United States Patent Application Publication US 2026/0234186 A1, published August 13, 2026 (application 19/322,608).

The application's sequence listing, which the Patent Office published only in electronic form, follows.

SEQUENCE LISTING (1132 sequences)

SEQ ID NO: 1 - skipped

SEQ ID NO: 2 - protein, 4 aa, synthetic construct
  REGION 1..4: note = Description of Artificial Sequence: Synthetic peptide
  MOD_RES 1: note = Dmt
  MOD_RES 3: note = Tmp
  MOD_RES 4: note = Lys(C1-Glucuronyl)
  REGION 1..4: note = C-term NH2
YPFK

SEQ ID NO: 3 - protein, 4 aa, synthetic construct
  REGION 1..4: note = Description of Artificial Sequence: Synthetic peptide
  MOD_RES 1: note = Dmt
  MOD_RES 3: note = Tmp
  MOD_RES 4: note = Lys(C8-Glucuronyl)
  REGION 1..4: note = C-term NH2
YPFK

SEQ ID NO: 4 - protein, 4 aa, synthetic construct
  REGION 1..4: note = Description of Artificial Sequence: Synthetic peptide
  MOD_RES 1: note = Dmt
  MOD_RES 3: note = Tmp
  MOD_RES 4: note = Lys(C12-Glucuronyl)
  REGION 1..4: note = C-term NH2
YPFK

SEQ ID NO: 5 - protein, 5 aa, synthetic construct
  REGION 1..5: note = Description of Artificial Sequence: Synthetic peptide
  MOD_RES 1: note = Dmt
  MOD_RES 3: note = Tmp
  MOD_RES 5: note = Lys(C1-Glucuronyl)
  REGION 1..5: note = C-term amide
YPFFK

SEQ ID NO: 6 - protein, 5 aa, synthetic construct
  REGION 1..5: note = Description of Artificial Sequence: Synthetic peptide
  MOD_RES 1: note = Dmt
  MOD_RES 3: note = Tmp
  MOD_RES 5: note = Lys(C12-Glucuronyl)
  REGION 1..5: note = C-term amide
YPFFK

SEQ ID NO: 7 - protein, 4 aa, synthetic construct
  REGION 1..4: note = Description of Artificial Sequence: Synthetic peptide
  MOD_RES 1: note = Dmt
  MOD_RES 2: note = D-Lys(C1-Glucuronyl)
  MOD_RES 3: note = TMP
  REGION 1..4: note = C-term NH2
YKFF

SEQ ID NO: 8 - protein, 4 aa, synthetic construct
  REGION 1..4: note = Description of Artificial Sequence: Synthetic peptide
  MOD_RES 1: note = Dmt
  MOD_RES 2: note = D-Lys(C12-Glucuronyl)
  MOD_RES 3: note = TMP
  REGION 1..4: note = C-term NH2
YKFF

SEQ ID NO: 9 - protein, 4 aa, synthetic construct
  REGION 1..4: note = Description of Artificial Sequence: Synthetic peptide
  MOD_RES 1: note = Dmt
  MOD_RES 2: note = D-Lys(C8-Glucuronyl)
  MOD_RES 3: note = TMP
  REGION 1..4: note = C-term NH2
YKFF

SEQ ID NO: 10 - protein, 4 aa, synthetic construct
  REGION 1..4: note = Description of Artificial Sequence: Synthetic peptide
  MOD_RES 1: note = Dmt
  MOD_RES 2: note = D-Lys(C10-Glucuronyl)
  MOD_RES 3: note = TMP
  REGION 1..4: note = C-term NH2
YKFF

SEQ ID NO: 11 - protein, 4 aa, synthetic construct
  REGION 1..4: note = Description of Artificial Sequence: Synthetic peptide
  MOD_RES 1: note = Dmt
  MOD_RES 2: note = D-Lys(C16-Glucuronyl)
  MOD_RES 3: note = TMP
  REGION 1..4: note = C-term NH2
YKFF

SEQ ID NO: 12 - protein, 4 aa, synthetic construct
  REGION 1..4: note = Description of Artificial Sequence: Synthetic peptide
  MOD_RES 1: note = Dmt
  MOD_RES 2: note = D-Lys(C18-Glucuronyl)
  MOD_RES 3: note = TMP
  REGION 1..4: note = C-term NH2
YKFF

SEQ ID NO: 13 - protein, 4 aa, synthetic construct
  REGION 1..4: note = Description of Artificial Sequence: Synthetic peptide
  MOD_RES 1: note = Dmt
  MOD_RES 2: note = D-Lys(C20-Glucuronyl)
  MOD_RES 3: note = TMP
  REGION 1..4: note = C-term NH2
YKFF

SEQ ID NO: 14 - protein, 4 aa, synthetic construct
  REGION 1..4: note = Description of Artificial Sequence: Synthetic peptide
  MOD_RES 1: note = Dmt
  MOD_RES 2: note = D-Lys(C22-Glucuronyl)
  MOD_RES 3: note = TMP
  REGION 1..4: note = C-term NH2
YKFF

SEQ ID NO: 15 - protein, 4 aa, synthetic construct
  REGION 1..4: note = Description of Artificial Sequence: Synthetic peptide
  MOD_RES 1: note = Dmt
  MOD_RES 2: note = D-Lys(C24-Glucuronyl)
  MOD_RES 3: note = TMP
  REGION 1..4: note = C-term NH2
YKFF

SEQ ID NO: 16 - protein, 4 aa, synthetic construct
  REGION 1..4: note = Description of Artificial Sequence: Synthetic peptide
  MOD_RES 1: note = Dmt
  MOD_RES 2: note = D-Lys(OPEG2k-Glucuronyl)
  MOD_RES 3: note = TMP
  REGION 1..4: note = C-term NH2
YKFF

SEQ ID NO: 17 - protein, 4 aa, synthetic construct
  REGION 1..4: note = Description of Artificial Sequence: Synthetic peptide
  MOD_RES 1: note = Dmt
  MOD_RES 2: note = D-Lys(OPEG30k-Glucuronyl)
  MOD_RES 3: note = TMP
  REGION 1..4: note = C-term NH2
YKFF

SEQ ID NO: 18 - protein, 4 aa, synthetic construct
  REGION 1..4: note = Description of Artificial Sequence: Synthetic peptide
  MOD_RES 1: note = Dmt
  MOD_RES 2: note = D-Lys(C1-Glucuronyl)
  MOD_RES 3: note = Nal(1)
  REGION 1..4: note = C-term NH2
YKAF

SEQ ID NO: 19 - protein, 4 aa, synthetic construct
  REGION 1..4: note = Description of Artificial Sequence: Synthetic peptide
  MOD_RES 1: note = Dmt
  MOD_RES 2: note = D-Lys(C12-Glucuronyl)
  MOD_RES 3: note = Nal(1)
  REGION 1..4: note = C-term NH2
YKAF

SEQ ID NO: 20 - protein, 4 aa, synthetic construct
  REGION 1..4: note = Description of Artificial Sequence: Synthetic peptide
  MOD_RES 1: note = Dmt
  MOD_RES 2: note = D-Lys(C8-Glucuronyl)
  MOD_RES 3: note = Nal(1)
  REGION 1..4: note = C-term NH2
YKAF

SEQ ID NO: 21 - protein, 4 aa, synthetic construct
  REGION 1..4: note = Description of Artificial Sequence: Synthetic peptide
  MOD_RES 1: note = Dmt
  MOD_RES 2: note = D-Lys(C12-Glucuronyl)
  MOD_RES 3: note = Nal(1)
  REGION 1..4: note = C-term NH2
YKAF

SEQ ID NO: 22 - protein, 4 aa, synthetic construct
  REGION 1..4: note = Description of Artificial Sequence: Synthetic peptide
  MOD_RES 1: note = Dmt
  MOD_RES 2: note = D-Lys(C16-Glucuronyl)
  MOD_RES 3: note = Nal(1)
  REGION 1..4: note = C-term NH2
YKAF

SEQ ID NO: 23 - protein, 4 aa, synthetic construct
  REGION 1..4: note = Description of Artificial Sequence: Synthetic peptide
  MOD_RES 1: note = Dmt
  MOD_RES 2: note = D-Lys(C18-Glucuronyl)
  MOD_RES 3: note = Nal(1)
  REGION 1..4: note = C-term NH2
YKAF

SEQ ID NO: 24 - protein, 4 aa, synthetic construct
  REGION 1..4: note = Description of Artificial Sequence: Synthetic peptide
  MOD_RES 1: note = Dmt
  MOD_RES 2: note = D-Lys(C20-Glucuronyl)
  MOD_RES 3: note = Nal(1)
  REGION 1..4: note = C-term NH2
YKAF

SEQ ID NO: 25 - protein, 4 aa, synthetic construct
  REGION 1..4: note = Description of Artificial Sequence: Synthetic peptide
  MOD_RES 1: note = Dmt
  MOD_RES 2: note = D-Lys(C22-Glucuronyl)
  MOD_RES 3: note = Nal(1)
  REGION 1..4: note = C-term NH2
YKAF

SEQ ID NO: 26 - protein, 4 aa, synthetic construct
  REGION 1..4: note = Description of Artificial Sequence: Synthetic peptide
  MOD_RES 1: note = Dmt
  MOD_RES 2: note = D-Lys(C24-Glucuronyl)
  MOD_RES 3: note = Nal(1)
  REGION 1..4: note = C-term NH2
YKAF

SEQ ID NO: 27 - protein, 4 aa, synthetic construct
  REGION 1..4: note = Description of Artificial Sequence: Synthetic peptide
  MOD_RES 1: note = Dmt
  MOD_RES 2: note = D-Lys(OPEG2k-Glucuronyl)
  MOD_RES 3: note = Nal(1)
  REGION 1..4: note = C-term NH2
YKAF

SEQ ID NO: 28 - protein, 4 aa, synthetic construct
  REGION 1..4: note = Description of Artificial Sequence: Synthetic peptide
  MOD_RES 1: note = Dmt
  MOD_RES 2: note = D-Lys(OPEG30k-Glucuronyl)
  MOD_RES 3: note = Nal(1)
  REGION 1..4: note = C-term NH2
YKAF

SEQ ID NO: 29 - protein, 4 aa, synthetic construct
  REGION 1..4: note = Description of Artificial Sequence: Synthetic peptide
  MOD_RES 1: note = Dmt
  MOD_RES 2: note = D-Lys(C1-Glucuronyl)
  MOD_RES 3: note = TMP
  REGION 1..4: note = C-term NH2
YKFK

SEQ ID NO: 30 - protein, 4 aa, synthetic construct
  REGION 1..4: note = Description of Artificial Sequence: Synthetic peptide
  MOD_RES 1: note = Dmt
  MOD_RES 2: note = D-Lys(C12-Glucuronyl)
  MOD_RES 3: note = TMP
  REGION 1..4: note = C-term NH2
YKFK

SEQ ID NO: 31 - protein, 4 aa, synthetic construct
  REGION 1..4: note = Description of Artificial Sequence: Synthetic peptide
  MOD_RES 1: note = Dmt
  MOD_RES 2: note = D-Lys(C8-Glucuronyl)
  MOD_RES 3: note = TMP
  REGION 1..4: note = C-term NH2
YKFK

SEQ ID NO: 32 - protein, 4 aa, synthetic construct
  REGION 1..4: note = Description of Artificial Sequence: Synthetic peptide
  MOD_RES 1: note = Dmt
  MOD_RES 2: note = D-Lys(C10-Glucuronyl)
  MOD_RES 3: note = TMP
  REGION 1..4: note = C-term NH2
YKFK

SEQ ID NO: 33 - protein, 4 aa, synthetic construct
  REGION 1..4: note = Description of Artificial Sequence: Synthetic peptide
  MOD_RES 1: note = Dmt
  MOD_RES 2: note = D-Lys(C16-Glucuronyl)
  MOD_RES 3: note = TMP
  REGION 1..4: note = C-term NH2
YKFK

SEQ ID NO: 34 - protein, 4 aa, synthetic construct
  REGION 1..4: note = Description of Artificial Sequence: Synthetic peptide
  MOD_RES 1: note = Dmt
  MOD_RES 2: note = D-Lys(C18-Glucuronyl)
  MOD_RES 3: note = TMP
  REGION 1..4: note = C-term NH2
YKFK

SEQ ID NO: 35 - protein, 4 aa, synthetic construct
  REGION 1..4: note = Description of Artificial Sequence: Synthetic peptide
  MOD_RES 1: note = Dmt
  MOD_RES 2: note = D-Lys(C20-Glucuronyl)
  MOD_RES 3: note = TMP
  REGION 1..4: note = C-term NH2
YKFK

SEQ ID NO: 36 - protein, 4 aa, synthetic construct
  REGION 1..4: note = Description of Artificial Sequence: Synthetic peptide
  MOD_RES 1: note = Dmt
  MOD_RES 2: note = D-Lys(C22-Glucuronyl)
  MOD_RES 3: note = TMP
  REGION 1..4: note = C-term NH2
YKFK

SEQ ID NO: 37 - protein, 4 aa, synthetic construct
  REGION 1..4: note = Description of Artificial Sequence: Synthetic peptide
  MOD_RES 1: note = Dmt
  MOD_RES 2: note = D-Lys(C24-Glucuronyl)
  MOD_RES 3: note = TMP
  REGION 1..4: note = C-term NH2
YKFK

SEQ ID NO: 38 - protein, 4 aa, synthetic construct
  REGION 1..4: note = Description of Artificial Sequence: Synthetic peptide
  MOD_RES 1: note = Dmt
  MOD_RES 2: note = D-Lys(OPEG2k-Glucuronyl)
  MOD_RES 3: note = TMP
  REGION 1..4: note = C-term NH2
YKFK

SEQ ID NO: 39 - protein, 4 aa, synthetic construct
  REGION 1..4: note = Description of Artificial Sequence: Synthetic peptide
  MOD_RES 1: note = Dmt
  MOD_RES 2: note = D-Lys(OPEG30k-Glucuronyl)
  MOD_RES 3: note = TMP
  REGION 1..4: note = C-term NH2
YKFK

SEQ ID NO: 40 - protein, 4 aa, synthetic construct
  REGION 1..4: note = Description of Artificial Sequence: Synthetic peptide
  MOD_RES 1: note = Dmt
  MOD_RES 2: note = D-Lys(C1-Glucuronyl)
  MOD_RES 3: note = Nal(2)
  REGION 1..4: note = C-term NH2
YKAK

SEQ ID NO: 41 - protein, 4 aa, synthetic construct
  REGION 1..4: note = Description of Artificial Sequence: Synthetic peptide
  MOD_RES 1: note = Dmt
  MOD_RES 2: note = D-Lys(C12-Glucuronyl)
  MOD_RES 3: note = Nal(2)
  REGION 1..4: note = C-term NH2
YKAK

SEQ ID NO: 42 - protein, 4 aa, synthetic construct
  REGION 1..4: note = Description of Artificial Sequence: Synthetic peptide
  MOD_RES 1: note = Dmt
  MOD_RES 2: note = D-Lys(C8-Glucuronyl)
  MOD_RES 3: note = Nal(2)
  REGION 1..4: note = C-term NH2
YKAK

SEQ ID NO: 43 - protein, 4 aa, synthetic construct
  REGION 1..4: note = Description of Artificial Sequence: Synthetic peptide
  MOD_RES 1: note = Dmt
  MOD_RES 2: note = D-Lys(C10-Glucuronyl)
  MOD_RES 3: note = Nal(2)
  REGION 1..4: note = C-term NH2
YKAK

SEQ ID NO: 44 - protein, 4 aa, synthetic construct
  REGION 1..4: note = Description of Artificial Sequence: Synthetic peptide
  MOD_RES 1: note = Dmt
  MOD_RES 2: note = D-Lys(C16-Glucuronyl)
  MOD_RES 3: note = Nal(2)
  REGION 1..4: note = C-term NH2
YKAK

SEQ ID NO: 45 - protein, 4 aa, synthetic construct
  REGION 1..4: note = Description of Artificial Sequence: Synthetic peptide
  MOD_RES 1: note = Dmt
  MOD_RES 2: note = D-Lys(C18-Glucuronyl)
  MOD_RES 3: note = Nal(2)
  REGION 1..4: note = C-term NH2
YKAK

SEQ ID NO: 46 - protein, 4 aa, synthetic construct
  REGION 1..4: note = Description of Artificial Sequence: Synthetic peptide
  MOD_RES 1: note = Dmt
  MOD_RES 2: note = D-Lys(C20-Glucuronyl)
  MOD_RES 3: note = Nal(2)
  REGION 1..4: note = C-term NH2
YKAK

SEQ ID NO: 47 - protein, 4 aa, synthetic construct
  REGION 1..4: note = Description of Artificial Sequence: Synthetic peptide
  MOD_RES 1: note = Dmt
  MOD_RES 2: note = D-Lys(C22-Glucuronyl)
  MOD_RES 3: note = Nal(2)
  REGION 1..4: note = C-term NH2
YKAK

SEQ ID NO: 48 - protein, 4 aa, synthetic construct
  REGION 1..4: note = Description of Artificial Sequence: Synthetic peptide
  MOD_RES 1: note = Dmt
  MOD_RES 2: note = D-Lys(C24-Glucuronyl)
  MOD_RES 3: note = Nal(2)
  REGION 1..4: note = C-term NH2
YKAK

SEQ ID NO: 49 - protein, 4 aa, synthetic construct
  REGION 1..4: note = Description of Artificial Sequence: Synthetic peptide
  MOD_RES 1: note = Dmt
  MOD_RES 2: note = D-Lys(OPEG2k-Glucuronyl)
  MOD_RES 3: note = Nal(2)
  REGION 1..4: note = C-term NH2
YKAK

SEQ ID NO: 50 - protein, 4 aa, synthetic construct
  REGION 1..4: note = Description of Artificial Sequence: Synthetic peptide
  MOD_RES 1: note = Dmt
  MOD_RES 2: note = D-Lys(OPEG30k-Glucuronyl)
  MOD_RES 3: note = Nal(2)
  REGION 1..4: note = C-term NH2
YKAK

SEQ ID NO: 51 - protein, 4 aa, synthetic construct
  REGION 1..4: note = Description of Artificial Sequence: Synthetic peptide
  MOD_RES 1: note = Dmt
  MOD_RES 2: note = D-Lys(C1-Glucuronyl)
  REGION 1..4: note = C-term NH2
YKFK

SEQ ID NO: 52 - protein, 4 aa, synthetic construct
  REGION 1..4: note = Description of Artificial Sequence: Synthetic peptide
  MOD_RES 1: note = Dmt
  MOD_RES 2: note = D-Lys(C12-Glucuronyl)
  REGION 1..4: note = C-term NH2
YKFK

SEQ ID NO: 53 - protein, 4 aa, synthetic construct
  REGION 1..4: note = Description of Artificial Sequence: Synthetic peptide
  MOD_RES 1: note = Dmt
  MOD_RES 2: note = D-Lys(C8-Glucuronyl)
  REGION 1..4: note = C-term NH2
YKFK

SEQ ID NO: 54 - protein, 4 aa, synthetic construct
  REGION 1..4: note = Description of Artificial Sequence: Synthetic peptide
  MOD_RES 1: note = Dmt
  MOD_RES 2: note = D-Lys(C10-Glucuronyl)
  REGION 1..4: note = C-term NH2
YKFK

SEQ ID NO: 55 - protein, 4 aa, synthetic construct
  REGION 1..4: note = Description of Artificial Sequence: Synthetic peptide
  MOD_RES 1: note = Dmt
  MOD_RES 2: note = D-Lys(C16-Glucuronyl)
  REGION 1..4: note = C-term NH2
YKFK

SEQ ID NO: 56 - protein, 4 aa, synthetic construct
  REGION 1..4: note = Description of Artificial Sequence: Synthetic peptide
  MOD_RES 1: note = Dmt
  MOD_RES 2: note = D-Lys(C18-Glucuronyl)
  REGION 1..4: note = C-term NH2
YKFK

SEQ ID NO: 57 - protein, 4 aa, synthetic construct
  REGION 1..4: note = Description of Artificial Sequence: Synthetic peptide
  MOD_RES 1: note = Dmt
  MOD_RES 2: note = D-Lys(C20-Glucuronyl)
  REGION 1..4: note = C-term NH2
YKFK

SEQ ID NO: 58 - protein, 4 aa, synthetic construct
  REGION 1..4: note = Description of Artificial Sequence: Synthetic peptide
  MOD_RES 1: note = Dmt
  MOD_RES 2: note = D-Lys(C22-Glucuronyl)
  REGION 1..4: note = C-term NH2
YKFK

SEQ ID NO: 59 - protein, 4 aa, synthetic construct
  REGION 1..4: note = Description of Artificial Sequence: Synthetic peptide
  MOD_RES 1: note = Dmt
  MOD_RES 2: note = D-Lys(C24-Glucuronyl)
  REGION 1..4: note = C-term NH2
YKFK

SEQ ID NO: 60 - protein, 4 aa, synthetic construct
  REGION 1..4: note = Description of Artificial Sequence: Synthetic peptide
  MOD_RES 1: note = Dmt
  MOD_RES 2: note = D-Lys(OPEG2k-Glucuronyl)
  REGION 1..4: note = C-term NH2
YKFK

SEQ ID NO: 61 - protein, 4 aa, synthetic construct
  REGION 1..4: note = Description of Artificial Sequence: Synthetic peptide
  MOD_RES 1: note = Dmt
  MOD_RES 2: note = D-Lys(OPEG30k-Glucuronyl)
  REGION 1..4: note = C-term NH2
YKFK

SEQ ID NO: 62 - protein, 4 aa, synthetic construct
  REGION 1..4: note = Description of Artificial Sequence: Synthetic peptide
  MOD_RES 1: note = Dmt
  MOD_RES 4: note = Lys(C1-Glucuronyl)
  REGION 1..4: note = C-term NH2
YPFK

SEQ ID NO: 63 - protein, 4 aa, synthetic construct
  REGION 1..4: note = Description of Artificial Sequence: Synthetic peptide
  MOD_RES 1: note = Dmt
  MOD_RES 4: note = Lys(C8-Glucuronyl)
  REGION 1..4: note = C-term NH2
YPFK

SEQ ID NO: 64 - protein, 4 aa, synthetic construct
  REGION 1..4: note = Description of Artificial Sequence: Synthetic peptide
  MOD_RES 1: note = Dmt
  MOD_RES 4: note = Lys(C12-Glucuronyl)
  REGION 1..4: note = C-term NH2
YPFK

SEQ ID NO: 65 - protein, 4 aa, synthetic construct
  REGION 1..4: note = Description of Artificial Sequence: Synthetic peptide
  MOD_RES 1: note = Dmt
  MOD_RES 4: note = D-Lys(C1-Glucuronyl)
  REGION 1..4: note = C-term NH2
YPFK

SEQ ID NO: 66 - protein, 4 aa, synthetic construct
  REGION 1..4: note = Description of Artificial Sequence: Synthetic peptide
  MOD_RES 1: note = Dmt
  MOD_RES 4: note = D-Lys(C8-Glucuronyl)
  REGION 1..4: note = C-term NH2
YPFK

SEQ ID NO: 67 - protein, 4 aa, synthetic construct
  REGION 1..4: note = Description of Artificial Sequence: Synthetic peptide
  MOD_RES 1: note = Dmt
  MOD_RES 4: note = D-Lys(C12-Glucuronyl)
  REGION 1..4: note = C-term NH2
YPFK

SEQ ID NO: 68 - protein, 5 aa, synthetic construct
  REGION 1..5: note = Description of Artificial Sequence: Synthetic peptide
  MOD_RES 1: note = Dmt
  MOD_RES 4: note = Lys(C1-Glucuronyl)
  REGION 1..5: note = C-term amide
YPFKP

SEQ ID NO: 69 - protein, 5 aa, synthetic construct
  REGION 1..5: note = Description of Artificial Sequence: Synthetic peptide
  MOD_RES 1: note = Dmt
  MOD_RES 4: note = Lys(C8-Glucuronyl)
  REGION 1..5: note = C-term amide
YPFKP

SEQ ID NO: 70 - protein, 5 aa, synthetic construct
  REGION 1..5: note = Description of Artificial Sequence: Synthetic peptide
  MOD_RES 1: note = Dmt
  MOD_RES 4: note = Lys(C12-Glucuronyl)
  REGION 1..5: note = C-term amide
YPFKP

SEQ ID NO: 71 - protein, 4 aa, synthetic construct
  REGION 1..4: note = Description of Artificial Sequence: Synthetic peptide
  MOD_RES 1: note = Dmt
  MOD_RES 4: note = MeLys(C1-Glucuronyl)
  REGION 1..4: note = C-term NH2
YPFK

SEQ ID NO: 72 - protein, 4 aa, synthetic construct
  REGION 1..4: note = Description of Artificial Sequence: Synthetic peptide
  MOD_RES 1: note = Dmt
  MOD_RES 4: note = MeLys(C8-Glucuronyl)
  REGION 1..4: note = C-term NH2
YPFK

SEQ ID NO: 73 - protein, 4 aa, synthetic construct
  REGION 1..4: note = Description of Artificial Sequence: Synthetic peptide
  MOD_RES 1: note = Dmt
  MOD_RES 4: note = MeLys(C12-Glucuronyl)
  REGION 1..4: note = C-term NH2
YPFK

SEQ ID NO: 74 - protein, 5 aa, synthetic construct
  REGION 1..5: note = Description of Artificial Sequence: Synthetic peptide
  MOD_RES 1: note = Dmt
  MOD_RES 5: note = Lys(C1-Glucuronyl)
  REGION 1..5: note = C-term amide
YPFFK

SEQ ID NO: 75 - protein, 5 aa, synthetic construct
  REGION 1..5: note = Description of Artificial Sequence: Synthetic peptide
  MOD_RES 1: note = Dmt
  MOD_RES 5: note = Lys(C12-Glucuronyl)
  REGION 1..5: note = C-term amide
YPFFK

SEQ ID NO: 76 - protein, 5 aa, synthetic construct
  REGION 1..5: note = Description of Artificial Sequence: Synthetic peptide
  MOD_RES 1: note = Dmt
  MOD_RES 5: note = MeLys(C1-Glucuronyl)
  REGION 1..5: note = C-term amide
YPFFK

SEQ ID NO: 77 - protein, 5 aa, synthetic construct
  REGION 1..5: note = Description of Artificial Sequence: Synthetic peptide
  MOD_RES 1: note = Dmt
  MOD_RES 5: note = MeLys(C12-Glucuronyl)
  REGION 1..5: note = C-term amide
YPFFK

SEQ ID NO: 78-88 - skipped (11 entries)

SEQ ID NO: 89 - protein, 5 aa, synthetic construct
  REGION 1..5: note = Description of Artificial Sequence: Synthetic peptide
  MOD_RES 1: note = Dmt
  MOD_RES 2: note = Tic
  MOD_RES 5: note = Lys(C1-Glucuronyl)
  REGION 1..5: note = C-term amide
YXFFK

SEQ ID NO: 90 - protein, 5 aa, synthetic construct
  REGION 1..5: note = Description of Artificial Sequence: Synthetic peptide
  MOD_RES 1: note = Dmt
  MOD_RES 2: note = Tic
  MOD_RES 5: note = Lys(C12-Glucuronyl)
  REGION 1..5: note = C-term amide
YXFFK

SEQ ID NO: 91 - protein, 5 aa, synthetic construct
  REGION 1..5: note = Description of Artificial Sequence: Synthetic peptide
  MOD_RES 1: note = Dmt
  MOD_RES 2: note = Tic
  MOD_RES 5: note = Lys(C8-Glucuronyl)
  REGION 1..5: note = C-term amide
YXFFK

SEQ ID NO: 92 - protein, 5 aa, synthetic construct
  REGION 1..5: note = Description of Artificial Sequence: Synthetic peptide
  MOD_RES 1: note = Dmt
  MOD_RES 2: note = Tic
  MOD_RES 5: note = Lys(C10-Glucuronyl)
  REGION 1..5: note = C-term amide
YXFFK

SEQ ID NO: 93 - protein, 5 aa, synthetic construct
  REGION 1..5: note = Description of Artificial Sequence: Synthetic peptide
  MOD_RES 1: note = Dmt
  MOD_RES 2: note = Tic
  MOD_RES 5: note = Lys(C16-Glucuronyl)
  REGION 1..5: note = C-term amide
YXFFK

SEQ ID NO: 94 - protein, 5 aa, synthetic construct
  REGION 1..5: note = Description of Artificial Sequence: Synthetic peptide
  MOD_RES 1: note = Dmt
  MOD_RES 2: note = Tic
  MOD_RES 5: note = Lys(C18-Glucuronyl)
  REGION 1..5: note = C-term amide
YXFFK

SEQ ID NO: 95 - protein, 5 aa, synthetic construct
  REGION 1..5: note = Description of Artificial Sequence: Synthetic peptide
  MOD_RES 1: note = Dmt
  MOD_RES 2: note = Tic
  MOD_RES 5: note = Lys(C20-Glucuronyl)
  REGION 1..5: note = C-term amide
YXFFK

SEQ ID NO: 96 - protein, 5 aa, synthetic construct
  REGION 1..5: note = Description of Artificial Sequence: Synthetic peptide
  MOD_RES 1: note = Dmt
  MOD_RES 2: note = Tic
  MOD_RES 5: note = Lys(C22-Glucuronyl)
  REGION 1..5: note = C-term amide
YXFFK

SEQ ID NO: 97 - protein, 5 aa, synthetic construct
  REGION 1..5: note = Description of Artificial Sequence: Synthetic peptide
  MOD_RES 1: note = Dmt
  MOD_RES 2: note = Tic
  MOD_RES 5: note = Lys(C24-Glucuronyl)
  REGION 1..5: note = C-term amide
YXFFK

SEQ ID NO: 98 - protein, 5 aa, synthetic construct
  REGION 1..5: note = Description of Artificial Sequence: Synthetic peptide
  MOD_RES 1: note = Dmt
  MOD_RES 2: note = Tic
  MOD_RES 5: note = Lys(OPEG2k-Glucuronyl)
  REGION 1..5: note = C-term amide
YXFFK

SEQ ID NO: 99 - protein, 5 aa, synthetic construct
  REGION 1..5: note = Description of Artificial Sequence: Synthetic peptide
  MOD_RES 1: note = Dmt
  MOD_RES 2: note = Tic
  MOD_RES 5: note = Lys(OPEG30k-Glucuronyl)
  REGION 1..5: note = C-term amide
YXFFK

SEQ ID NO: 100-134 - skipped (35 entries)

SEQ ID NO: 135 - protein, 5 aa, synthetic construct
  REGION 1..5: note = Description of Artificial Sequence: Synthetic peptide
  MOD_RES 1: note = Dmt
  MOD_RES 4: note = Lys(C1-Glucuronyl)
  MOD_RES 5: note = Aib
  REGION 1..5: note = C-term amide
YPFKX

SEQ ID NO: 136 - protein, 5 aa, synthetic construct
  REGION 1..5: note = Description of Artificial Sequence: Synthetic peptide
  MOD_RES 1: note = Dmt
  MOD_RES 4: note = Lys(C8-Glucuronyl)
  MOD_RES 5: note = Aib
  REGION 1..5: note = C-term amide
YPFKX

SEQ ID NO: 137 - protein, 5 aa, synthetic construct
  REGION 1..5: note = Description of Artificial Sequence: Synthetic peptide
  MOD_RES 1: note = Dmt
  MOD_RES 4: note = Lys(C10-Glucuronyl)
  MOD_RES 5: note = Aib
  REGION 1..5: note = C-term amide
YPFKX

SEQ ID NO: 138 - protein, 5 aa, synthetic construct
  REGION 1..5: note = Description of Artificial Sequence: Synthetic peptide
  MOD_RES 1: note = Dmt
  MOD_RES 4: note = Lys(C12-Glucuronyl)
  MOD_RES 5: note = Aib
  REGION 1..5: note = C-term amide
YPFKX

SEQ ID NO: 139-170 - skipped (32 entries)

SEQ ID NO: 171 - protein, 26 aa, synthetic construct
  REGION 1..26: note = Description of Artificial Sequence: Synthetic peptide
  MOD_RES 1: note = Aib or Ac5c
  MOD_RES 3: note = Aib
  MOD_RES 8: note = Nle
  MOD_RES 12: note = Ala, Glu, Lys, Aib or Ac5c
  MOD_RES 14: note = Trp, Phe, Lys, Glu or Nal(2)
  MOD_RES 16: note = Gln, Asn, Glu, Lys, Cit or U(X); wherein "U(X)" is any linker amino acid covalently attached to the surfactant X
  MOD_RES 17: note = Asp, Ser, Aib, Ac4c, Ac5C or U(X); wherein "U(X)" is any linker amino acid covalently attached to the surfactant X
  MOD_RES 18: note = Absent or Leu, Gln, Aib, Lys, Glu or U(X); wherein "U(X)" is any linker amino acid covalently attached to the surfactant X
  MOD_RES 19: note = Absent or Arg, Glu, Aib, Ac4c or Ac5c
  MOD_RES 20: note = Absent or Arg, Glu, Lys, Aib, Ac4c, Ac5c
  MOD_RES 21: note = Absent or Arg, Val, Aib, Ac5C or Deg
  MOD_RES 22: note = Absent or Phe, Glu, Lys or U(X); wherein "U(X)" is any linker amino acid covalently attached to the surfactant X
  MOD_RES 23: note = Absent or Leu, Phe, Trp or U(X); wherein "U(X)" is any linker amino acid covalently attached to the surfactant X
  MOD_RES 24: note = Absent or His, Arg or U(X); wherein "U(X)" is any linker amino acid covalently attached to the surfactant X
  MOD_RES 25: note = Absent or His, Lys or U(X); wherein "U(X)" is any linker amino acid covalently attached to the surfactant X
  MOD_RES 26: note = Absent or Aib or Ac5c
  REGION 1..26: note = C-term may be OH or NH2
  REGION 1..26: note = see specification as filed for detailed description of substitutions and preferred embodiments
XVXEIQLLHQRXRXIXXXXXXXXXXX

SEQ ID NO: 172-173 - skipped (2 entries)

SEQ ID NO: 174 - protein, 26 aa, synthetic construct
  REGION 1..26: note = Description of Artificial Sequence: Synthetic peptide
  MOD_RES 1: note = Aib or Ac5c
  MOD_RES 3: note = Aib
  MOD_RES 8: note = Nle
  MOD_RES 11: note = hArg
  MOD_RES 12: note = Ala, Glu, Lys, Aib or Ac5c
  MOD_RES 14: note = Trp, Phe or Nal(2)
  MOD_RES 16: note = Gln, Asn, Glu, Lys, Cit or U(X); wherein "U" is any linking amino acid and "X" is a surfactant from the 1-alkyl glycoside linked to "U"
  MOD_RES 17: note = Asp, Ser, Aib, Ac4c, Ac5c or U(X); wherein "U" is any linking amino acid and "X" is a surfactant from the 1-alkyl glycoside linked to "U"
  MOD_RES 18: note = Absent or Leu, Gln, Aib or U(X); wherein "U" is any linking amino acid and "X" is a surfactant from the 1-alkyl glycoside linked to "U"
  MOD_RES 19: note = Absent or Arg, Glu, Aib, Ac4c, or Ac5c
  MOD_RES 20: note = Absent or Arg, Glu, Lys, Aib, Ac4c or Ac5c
  MOD_RES 21: note = Absent or Arg, Val, Aib, Ac5C or Deg
  MOD_RES 22: note = Absent or Phe, Glu, Lys or U(X); wherein "U" is any linking amino acid and "X" is a surfactant from the 1-alkyl glycoside linked to "U"
  MOD_RES 23: note = Absent or Leu, Phe, Trp or U(X); wherein "U" is any linking amino acid and "X" is a surfactant from the 1-alkyl glycoside linked to "U"
  MOD_RES 24: note = Absent or His, Arg or U; wherein "U" is any linking amino acid
  MOD_RES 25: note = Absent or His, Lys, or U; wherein "U" is any linking amino acid
  MOD_RES 26: note = Absent or Aib or Ac5c
  REGION 1..26: note = C-term OH or -NH2
  REGION 1..26: note = see specification as filed for detailed description of substitutions and preferred embodiments
XVXEIQLLHQRXRXIXXXXXXXXXXX

SEQ ID NO: 175 - protein, 17 aa, synthetic construct
  REGION 1..17: note = Description of Artificial Sequence: Synthetic peptide
  MOD_RES 1: note = Ac5c
  MOD_RES 3: note = Aib
  MOD_RES 8: note = Nle
  MOD_RES 11: note = hArg
  MOD_RES 17: note = Lys(C1)
  REGION 1..17: note = C-term amide
XVXEIQLLHQRARFIQK

SEQ ID NO: 176 - protein, 17 aa, synthetic construct
  REGION 1..17: note = Description of Artificial Sequence: Synthetic peptide
  MOD_RES 1: note = Ac5c
  MOD_RES 3: note = Aib
  MOD_RES 8: note = Nle
  MOD_RES 11: note = hArg
  MOD_RES 17: note = Lys(C8)
  REGION 1..17: note = C-term amide
XVXEIQLLHQRARFIQK

SEQ ID NO: 177 - protein, 17 aa, synthetic construct
  REGION 1..17: note = Description of Artificial Sequence: Synthetic peptide
  MOD_RES 1: note = Ac5c
  MOD_RES 3: note = Aib
  MOD_RES 8: note = Nle
  MOD_RES 11: note = hArg
  MOD_RES 17: note = Lys(C12)
  REGION 1..17: note = C-term amide
XVXEIQLLHQRARFIQK

SEQ ID NO: 178 - protein, 17 aa, synthetic construct
  REGION 1..17: note = Description of Artificial Sequence: Synthetic peptide
  MOD_RES 1: note = Ac5c
  MOD_RES 3: note = Aib
  MOD_RES 8: note = Nle
  MOD_RES 11: note = hArg
  MOD_RES 17: note = Lys(C12)
  REGION 1..17: note = C-term amide
XVXEIQLLHQRARWIQK

SEQ ID NO: 179 - protein, 16 aa, synthetic construct
  REGION 1..16: note = Description of Artificial Sequence: Synthetic peptide
  MOD_RES 1: note = Ac5c
  MOD_RES 3: note = Aib
  MOD_RES 8: note = Nle
  MOD_RES 11: note = hArg
  MOD_RES 16: note = Lys(C12)
  REGION 1..16: note = C-term amide
XVXEIQLLHQRARWIK

SEQ ID NO: 180 - protein, 18 aa, synthetic construct
  REGION 1..18: note = Description of Artificial Sequence: Synthetic peptide
  MOD_RES 1: note = Ac5c
  MOD_RES 3: note = Aib
  MOD_RES 8: note = Nle
  MOD_RES 11: note = hArg
  MOD_RES 17: note = Aib
  MOD_RES 18: note = Lys(C12)
  REGION 1..18: note = C-term amide
XVXEIQLLHQRARWIQXK

SEQ ID NO: 181 - protein, 18 aa, synthetic construct
  REGION 1..18: note = Description of Artificial Sequence: Synthetic peptide
  MOD_RES 1: note = Ac5c
  MOD_RES 3: note = Aib
  MOD_RES 8: note = Nle
  MOD_RES 11: note = hArg
  MOD_RES 17: note = Aib
  MOD_RES 18: note = Lys(C12)
  REGION 1..18: note = C-term amide
XVXEIQLLHQRARFIQXK

SEQ ID NO: 182 - protein, 18 aa, synthetic construct
  REGION 1..18: note = Description of Artificial Sequence: Synthetic peptide
  MOD_RES 1: note = Ac5c
  MOD_RES 3: note = Aib
  MOD_RES 8: note = Nle
  MOD_RES 11: note = hArg
  MOD_RES 17: note = Aib
  MOD_RES 18: note = Lys(C16)
  REGION 1..18: note = C-term amide
XVXEIQLLHQRARWIQXK

SEQ ID NO: 183 - protein, 22 aa, synthetic construct
  REGION 1..22: note = Description of Artificial Sequence: Synthetic peptide
  MOD_RES 1: note = Ac5c
  MOD_RES 3: note = Aib
  MOD_RES 8: note = Nle
  MOD_RES 11: note = hArg
  MOD_RES 21: note = Aib
  MOD_RES 22: note = Lys(C8)
  REGION 1..22: note = C-term amide
XVXEIQLLHQRARWIQDLRRXK

SEQ ID NO: 184 - protein, 22 aa, synthetic construct
  REGION 1..22: note = Description of Artificial Sequence: Synthetic peptide
  MOD_RES 1: note = Ac5c
  MOD_RES 3: note = Aib
  MOD_RES 8: note = Nle
  MOD_RES 11: note = hArg
  MOD_RES 21: note = Aib
  MOD_RES 22: note = Lys(C12)
  REGION 1..22: note = C-term amide
XVXEIQLLHQRARWIQDLRRXK

SEQ ID NO: 185 - protein, 22 aa, synthetic construct
  REGION 1..22: note = Description of Artificial Sequence: Synthetic peptide
  MOD_RES 1: note = Ac5c
  MOD_RES 3: note = Aib
  MOD_RES 8: note = Nle
  MOD_RES 11: note = hArg
  MOD_RES 21: note = Aib
  MOD_RES 22: note = Lys(C16)
  REGION 1..22: note = C-term amide
XVXEIQLLHQRARWIQDLRRXK

SEQ ID NO: 186 - protein, 17 aa, synthetic construct
  REGION 1..17: note = Description of Artificial Sequence: Synthetic peptide
  MOD_RES 1: note = Ac5c
  MOD_RES 3: note = Aib
  MOD_RES 8: note = Nle
  MOD_RES 11: note = hArg
  MOD_RES 12: note = Aib
  MOD_RES 17: note = Lys(C1)
  REGION 1..17: note = C-term amide
XVXEIQLLHQRXRFIQK

SEQ ID NO: 187 - protein, 17 aa, synthetic construct
  REGION 1..17: note = Description of Artificial Sequence: Synthetic peptide
  MOD_RES 1: note = Ac5c
  MOD_RES 3: note = Aib
  MOD_RES 8: note = Nle
  MOD_RES 11: note = hArg
  MOD_RES 12: note = Aib
  MOD_RES 17: note = Lys(C8)
  REGION 1..17: note = C-term amide
XVXEIQLLHQRXRFIQK

SEQ ID NO: 188 - skipped

SEQ ID NO: 189 - protein, 17 aa, synthetic construct
  REGION 1..17: note = Description of Artificial Sequence: Synthetic peptide
  MOD_RES 1: note = Ac5c
  MOD_RES 3: note = Aib
  MOD_RES 8: note = Nle
  MOD_RES 11: note = hArg
  MOD_RES 12: note = Aib
  MOD_RES 17: note = Lys(C12)
  REGION 1..17: note = C-term amide
XVXEIQLLHQRXRFIQK

SEQ ID NO: 190 - protein, 17 aa, synthetic construct
  REGION 1..17: note = Description of Artificial Sequence: Synthetic peptide
  MOD_RES 1: note = Ac5c
  MOD_RES 3: note = Aib
  MOD_RES 8: note = Nle
  MOD_RES 11: note = hArg
  MOD_RES 12: note = Aib
  MOD_RES 17: note = Lys(C12)
  REGION 1..17: note = C-term amide
XVXEIQLLHQRXRWIQK

SEQ ID NO: 191 - protein, 16 aa, synthetic construct
  REGION 1..16: note = Description of Artificial Sequence: Synthetic peptide
  MOD_RES 1: note = Ac5c
  MOD_RES 3: note = Aib
  MOD_RES 8: note = Nle
  MOD_RES 11: note = hArg
  MOD_RES 15: note = Aib
  MOD_RES 16: note = Lys(C12)
  REGION 1..16: note = C-term amide
XVXEIQLLHQRARWXK

SEQ ID NO: 192 - protein, 17 aa, synthetic construct
  REGION 1..17: note = Description of Artificial Sequence: Synthetic peptide
  MOD_RES 1: note = Ac5c
  MOD_RES 3: note = Aib
  MOD_RES 8: note = Nle
  MOD_RES 11: note = hArg
  MOD_RES 15: note = Aib
  MOD_RES 17: note = Lys(C12)
  REGION 1..17: note = C-term amide
XVXEIQLLHQRARWXQK

SEQ ID NO: 193 - protein, 17 aa, synthetic construct
  REGION 1..17: note = Description of Artificial Sequence: Synthetic peptide
  MOD_RES 1: note = Ac5c
  MOD_RES 3: note = Aib
  MOD_RES 8: note = Nle
  MOD_RES 11: note = hArg
  MOD_RES 12: note = Aib
  MOD_RES 17: note = Lys(C12)
  REGION 1..17: note = C-term amide
XVXEIQLLHQRXRWIQK

SEQ ID NO: 194 - protein, 17 aa, synthetic construct
  REGION 1..17: note = Description of Artificial Sequence: Synthetic peptide
  MOD_RES 1: note = Ac5c
  MOD_RES 3: note = Aib
  MOD_RES 8: note = Nle
  MOD_RES 11: note = hArg
  MOD_RES 12: note = Aib
  MOD_RES 14: note = Nal2
  MOD_RES 17: note = Lys(C12)
  REGION 1..17: note = C-term amide
XVXEIQLLHQRXRAIQK

SEQ ID NO: 195 - protein, 18 aa, synthetic construct
  REGION 1..18: note = Description of Artificial Sequence: Synthetic peptide
  MOD_RES 1: note = Ac5c
  MOD_RES 3: note = Aib
  MOD_RES 8: note = Nle
  MOD_RES 11: note = hArg
  MOD_RES 12: note = Aib
  MOD_RES 17: note = Aib
  MOD_RES 18: note = Lys(C12)
  REGION 1..18: note = C-term amide
XVXEIQLLHQRXRWIQXK

SEQ ID NO: 196 - protein, 18 aa, synthetic construct
  REGION 1..18: note = Description of Artificial Sequence: Synthetic peptide
  MOD_RES 1: note = Ac5c
  MOD_RES 3: note = Aib
  MOD_RES 8: note = Nle
  MOD_RES 11: note = hArg
  MOD_RES 12: note = Aib
  MOD_RES 17: note = Aib
  MOD_RES 18: note = Lys(C12)
  REGION 1..18: note = C-term amide
XVXEIQLLHQRXRFIQXK

SEQ ID NO: 197 - protein, 18 aa, synthetic construct
  REGION 1..18: note = Description of Artificial Sequence: Synthetic peptide
  MOD_RES 1: note = Ac5c
  MOD_RES 3: note = Aib
  MOD_RES 8: note = Nle
  MOD_RES 11: note = hArg
  MOD_RES 12: note = Aib
  MOD_RES 14: note = Nal2
  MOD_RES 17: note = Aib
  MOD_RES 18: note = Lys(C12)
  REGION 1..18: note = C-term amide
XVXEIQLLHQRXRAIQXK

SEQ ID NO: 198 - protein, 18 aa, synthetic construct
  REGION 1..18: note = Description of Artificial Sequence: Synthetic peptide
  MOD_RES 1: note = Ac5c
  MOD_RES 3: note = Aib
  MOD_RES 8: note = Nle
  MOD_RES 11: note = hArg
  MOD_RES 12: note = Aib
  MOD_RES 17: note = Aib
  MOD_RES 18: note = Lys(C16)
  REGION 1..18: note = C-term amide
XVXEIQLLHQRXRWIQXK

SEQ ID NO: 199 - protein, 22 aa, synthetic construct
  REGION 1..22: note = Description of Artificial Sequence: Synthetic peptide
  MOD_RES 1: note = Ac5c
  MOD_RES 3: note = Aib
  MOD_RES 8: note = Nle
  MOD_RES 11: note = hArg
  MOD_RES 12: note = Aib
  MOD_RES 21: note = Aib
  MOD_RES 22: note = Lys(C8)
  REGION 1..22: note = C-term amide
XVXEIQLLHQRXRWIQDLRRXK

SEQ ID NO: 200 - protein, 22 aa, synthetic construct
  REGION 1..22: note = Description of Artificial Sequence: Synthetic peptide
  MOD_RES 1: note = Ac5c
  MOD_RES 3: note = Aib
  MOD_RES 8: note = Nle
  MOD_RES 11: note = hArg
  MOD_RES 12: note = Aib
  MOD_RES 21: note = Aib
  MOD_RES 22: note = Lys(C12)
  REGION 1..22: note = C-term amide
XVXEIQLLHQRXRWIQDLRRXK

SEQ ID NO: 201 - protein, 22 aa, synthetic construct
  REGION 1..22: note = Description of Artificial Sequence: Synthetic peptide
  MOD_RES 1: note = Ac5c
  MOD_RES 3: note = Aib
  MOD_RES 8: note = Nle
  MOD_RES 11: note = hArg
  MOD_RES 12: note = Aib
  MOD_RES 21: note = Aib
  MOD_RES 22: note = Lys(C16)
  REGION 1..22: note = C-term amide
XVXEIQLLHQRXRWIQDLRRXK

SEQ ID NO: 202 - protein, 19 aa, synthetic construct
  REGION 1..19: note = Description of Artificial Sequence: Synthetic peptide
  MOD_RES 1: note = Ac5c
  MOD_RES 3: note = Aib
  MOD_RES 8: note = Nle
  MOD_RES 11: note = hArg
  MOD_RES 12: note = Aib
  MOD_RES 18: note = Lys(C12)
  MOD_RES 19: note = Aib
  REGION 1..19: note = C-term amide
XVXEIQLLHQRXRWIQDKX

SEQ ID NO: 203 - protein, 19 aa, synthetic construct
  REGION 1..19: note = Description of Artificial Sequence: Synthetic peptide
  MOD_RES 1: note = Ac5c
  MOD_RES 3: note = Aib
  MOD_RES 8: note = Nle
  MOD_RES 11: note = hArg
  MOD_RES 12: note = Aib
  MOD_RES 18: note = Lys(C12)
  MOD_RES 19: note = Aib
  REGION 1..19: note = C-term amide
XVXEIQLLHQRXRFIQDKX

SEQ ID NO: 204 - protein, 19 aa, synthetic construct
  REGION 1..19: note = Description of Artificial Sequence: Synthetic peptide
  MOD_RES 1: note = Ac5c
  MOD_RES 3: note = Aib
  MOD_RES 8: note = Nle
  MOD_RES 11: note = hArg
  MOD_RES 12: note = Aib
  MOD_RES 18: note = Lys(C16)
  MOD_RES 19: note = Aib
  REGION 1..19: note = C-term amide
XVXEIQLLHQRXRWIQDKX

SEQ ID NO: 205 - protein, 18 aa, synthetic construct
  REGION 1..18: note = Description of Artificial Sequence: Synthetic peptide
  MOD_RES 1: note = Ac5c
  MOD_RES 3: note = Aib
  MOD_RES 8: note = Nle
  MOD_RES 11: note = hArg
  MOD_RES 12: note = Aib
  MOD_RES 17: note = Lys(C12)
  MOD_RES 18: note = Aib
  REGION 1..18: note = C-term amide
XVXEIQLLHQRXRWIQKX

SEQ ID NO: 206 - protein, 18 aa, synthetic construct
  REGION 1..18: note = Description of Artificial Sequence: Synthetic peptide
  MOD_RES 1: note = Ac5c
  MOD_RES 3: note = Aib
  MOD_RES 8: note = Nle
  MOD_RES 11: note = hArg
  MOD_RES 17: note = Lys(C12)
  MOD_RES 18: note = Aib
  REGION 1..18: note = C-term amide
XVXEIQLLHQRARWIQKX

SEQ ID NO: 207 - protein, 19 aa, synthetic construct
  REGION 1..19: note = Description of Artificial Sequence: Synthetic peptide
  MOD_RES 1: note = Ac5c
  MOD_RES 3: note = Aib
  MOD_RES 8: note = Nle
  MOD_RES 11: note = hArg
  MOD_RES 17: note = Aib
  MOD_RES 18: note = Lys(C12)
  MOD_RES 19: note = Aib
  REGION 1..19: note = C-term amide
XVXEIQLLHQRARWIQXKX

SEQ ID NO: 208 - protein, 18 aa, synthetic construct
  REGION 1..18: note = Description of Artificial Sequence: Synthetic peptide
  MOD_RES 1: note = Ac5c
  MOD_RES 3: note = Aib
  MOD_RES 8: note = Nle
  MOD_RES 11: note = hArg
  MOD_RES 17: note = Lys(C12)
  MOD_RES 18: note = Aib
  REGION 1..18: note = C-term amide
XVXEIQLLHQRARFIQKX

SEQ ID NO: 209 - protein, 19 aa, synthetic construct
  REGION 1..19: note = Description of Artificial Sequence: Synthetic peptide
  MOD_RES 1: note = Ac5c
  MOD_RES 3: note = Aib
  MOD_RES 8: note = Nle
  MOD_RES 11: note = hArg
  MOD_RES 17: note = Aib
  MOD_RES 18: note = Lys(C12)
  MOD_RES 19: note = Aib
  REGION 1..19: note = C-term amide
XVXEIQLLHQRARFIQXKX

SEQ ID NO: 210 - protein, 18 aa, synthetic construct
  REGION 1..18: note = Description of Artificial Sequence: Synthetic peptide
  MOD_RES 1: note = Ac5c
  MOD_RES 3: note = Aib
  MOD_RES 8: note = Nle
  MOD_RES 11: note = hArg
  MOD_RES 12: note = Aib
  MOD_RES 17: note = Lys(C12)
  MOD_RES 18: note = Aib
  REGION 1..18: note = C-term amide
XVXEIQLLHQRXRWIQKX

SEQ ID NO: 211 - protein, 19 aa, synthetic construct
  REGION 1..19: note = Description of Artificial Sequence: Synthetic peptide
  MOD_RES 1: note = Ac5c
  MOD_RES 3: note = Aib
  MOD_RES 8: note = Nle
  MOD_RES 11: note = hArg
  MOD_RES 12: note = Aib
  MOD_RES 17: note = Aib
  MOD_RES 18: note = Lys(C12)
  MOD_RES 19: note = Aib
  REGION 1..19: note = C-term amide
XVXEIQLLHQRXRWIQXKX

SEQ ID NO: 212 - protein, 18 aa, synthetic construct
  REGION 1..18: note = Description of Artificial Sequence: Synthetic peptide
  MOD_RES 1: note = Ac5c
  MOD_RES 3: note = Aib
  MOD_RES 11: note = hArg
  MOD_RES 12: note = Aib
  MOD_RES 17: note = Lys(C12)
  MOD_RES 18: note = Aib
  REGION 1..18: note = C-term amide
XVXEIQLLHQRXRFIQKX

SEQ ID NO: 213 - protein, 19 aa, synthetic construct
  REGION 1..19: note = Description of Artificial Sequence: Synthetic peptide
  MOD_RES 1: note = Ac5c
  MOD_RES 3: note = Aib
  MOD_RES 11: note = hArg
  MOD_RES 12: note = Aib
  MOD_RES 17: note = Aib
  MOD_RES 18: note = Lys(C12)
  MOD_RES 19: note = Aib
  REGION 1..19: note = C-term amide
XVXEIQLLHQRXRFIQXKX

SEQ ID NO: 214 - protein, 18 aa, synthetic construct
  REGION 1..18: note = Description of Artificial Sequence: Synthetic peptide
  MOD_RES 1: note = Ac5c
  MOD_RES 3: note = Aib
  MOD_RES 8: note = Nle
  MOD_RES 11: note = hArg
  MOD_RES 17: note = Lys(C12)
  MOD_RES 18: note = Aib
  REGION 1..18: note = C-term amide
XVXEHQLLHQRARWIQKX

SEQ ID NO: 215 - protein, 19 aa, synthetic construct
  REGION 1..19: note = Description of Artificial Sequence: Synthetic peptide
  MOD_RES 1: note = Ac5c
  MOD_RES 3: note = Aib
  MOD_RES 8: note = Nle
  MOD_RES 11: note = hArg
  MOD_RES 17: note = Aib
  MOD_RES 18: note = Lys(C12)
  MOD_RES 19: note = Aib
  REGION 1..19: note = C-term amide
XVXEHQLLHQRARWIQXKX

SEQ ID NO: 216 - protein, 18 aa, synthetic construct
  REGION 1..18: note = Description of Artificial Sequence: Synthetic peptide
  MOD_RES 1: note = Ac5c
  MOD_RES 3: note = Aib
  MOD_RES 8: note = Nle
  MOD_RES 11: note = hArg
  MOD_RES 17: note = Lys(C12)
  MOD_RES 18: note = Aib
  REGION 1..18: note = C-term amide
XVXEHQLLHQRARFIQKX

SEQ ID NO: 217 - protein, 19 aa, synthetic construct
  REGION 1..19: note = Description of Artificial Sequence: Synthetic peptide
  MOD_RES 1: note = Ac5c
  MOD_RES 3: note = Aib
  MOD_RES 8: note = Nle
  MOD_RES 11: note = hArg
  MOD_RES 17: note = Aib
  MOD_RES 18: note = Lys(C12)
  MOD_RES 19: note = Aib
  REGION 1..19: note = C-term amide
XVXEHQLLHQRARFIQXKX

SEQ ID NO: 218 - protein, 18 aa, synthetic construct
  REGION 1..18: note = Description of Artificial Sequence: Synthetic peptide
  MOD_RES 1: note = Ac5c
  MOD_RES 3: note = Aib
  MOD_RES 11: note = hArg
  MOD_RES 17: note = Lys(C12)
  MOD_RES 18: note = Aib
  REGION 1..18: note = C-term amide
XVXEHQLLHQRARWIQKX

SEQ ID NO: 219 - protein, 19 aa, synthetic construct
  REGION 1..19: note = Description of Artificial Sequence: Synthetic peptide
  MOD_RES 1: note = Ac5c
  MOD_RES 3: note = Aib
  MOD_RES 11: note = hArg
  MOD_RES 17: note = Aib
  MOD_RES 18: note = Lys(C12)
  MOD_RES 19: note = Aib
  REGION 1..19: note = C-term amide
XVXEHQLLHQRARWIQXKX

SEQ ID NO: 220 - protein, 18 aa, synthetic construct
  REGION 1..18: note = Description of Artificial Sequence: Synthetic peptide
  MOD_RES 1: note = Ac5c
  MOD_RES 3: note = Aib
  MOD_RES 11: note = hArg
  MOD_RES 17: note = Lys(C12)
  MOD_RES 18: note = Aib
  REGION 1..18: note = C-term amide
XVXEHQLLHQRARFIQKX

SEQ ID NO: 221 - protein, 19 aa, synthetic construct
  REGION 1..19: note = Description of Artificial Sequence: Synthetic peptide
  MOD_RES 1: note = Ac5c
  MOD_RES 3: note = Aib
  MOD_RES 11: note = hArg
  MOD_RES 17: note = Aib
  MOD_RES 18: note = Lys(C12)
  MOD_RES 19: note = Aib
  REGION 1..19: note = C-term amide
XVXEHQLLHQRARFIQXKX

SEQ ID NO: 222 - protein, 18 aa, synthetic construct
  REGION 1..18: note = Description of Artificial Sequence: Synthetic peptide
  MOD_RES 1: note = Ac5c
  MOD_RES 3: note = Aib
  MOD_RES 11: note = hArg
  MOD_RES 12: note = Aib
  MOD_RES 17: note = Lys(C12)
  MOD_RES 18: note = Aib
  REGION 1..18: note = C-term amide
XVXEHQLLHQRXRWIQKX

SEQ ID NO: 223 - protein, 19 aa, synthetic construct
  REGION 1..19: note = Description of Artificial Sequence: Synthetic peptide
  MOD_RES 1: note = Ac5c
  MOD_RES 3: note = Aib
  MOD_RES 11: note = hArg
  MOD_RES 12: note = Aib
  MOD_RES 17: note = Aib
  MOD_RES 18: note = Lys(C12)
  MOD_RES 19: note = Aib
  REGION 1..19: note = C-term amide
XVXEHQLLHQRXRWIQXKX

SEQ ID NO: 224 - protein, 18 aa, synthetic construct
  REGION 1..18: note = Description of Artificial Sequence: Synthetic peptide
  MOD_RES 1: note = Ac5c
  MOD_RES 3: note = Aib
  MOD_RES 11: note = hArg
  MOD_RES 12: note = Aib
  MOD_RES 17: note = Lys(C12)
  MOD_RES 18: note = Aib
  REGION 1..18: note = C-term amide
XVXEHQLLHQRXRFIQKX

SEQ ID NO: 225 - protein, 19 aa, synthetic construct
  REGION 1..19: note = Description of Artificial Sequence: Synthetic peptide
  MOD_RES 1: note = Ac5c
  MOD_RES 3: note = Aib
  MOD_RES 11: note = hArg
  MOD_RES 12: note = Aib
  MOD_RES 17: note = Aib
  MOD_RES 18: note = Lys(C12)
  MOD_RES 19: note = Aib
  REGION 1..19: note = C-term amide
XVXEHQLLHQRXRFIQXKX

SEQ ID NO: 226 - protein, 21 aa, synthetic construct
  REGION 1..21: note = Description of Artificial Sequence: Synthetic peptide
  MOD_RES 1: note = Ac5c
  MOD_RES 3: note = Aib
  MOD_RES 8: note = Nle
  MOD_RES 11: note = hArg
  MOD_RES 19: note = Lys(C12)
  MOD_RES 21: note = Aib
  REGION 1..21: note = C-term amide
XVXEIQLLHQRARWIQDLKRX

SEQ ID NO: 227 - protein, 21 aa, synthetic construct
  REGION 1..21: note = Description of Artificial Sequence: Synthetic peptide
  MOD_RES 1: note = Ac5c
  MOD_RES 3: note = Aib
  MOD_RES 8: note = Nle
  MOD_RES 11: note = hArg
  MOD_RES 19: note = Lys(C14)
  MOD_RES 21: note = Aib
  REGION 1..21: note = C-term amide
XVXEIQLLHQRARWIQDLKRX

SEQ ID NO: 228 - protein, 21 aa, synthetic construct
  REGION 1..21: note = Description of Artificial Sequence: Synthetic peptide
  MOD_RES 1: note = Ac5c
  MOD_RES 3: note = Aib
  MOD_RES 8: note = Nle
  MOD_RES 11: note = hArg
  MOD_RES 19: note = Lys(C16)
  MOD_RES 21: note = Aib
  REGION 1..21: note = C-term amide
XVXEIQLLHQRARWIQDLKRX

SEQ ID NO: 229 - protein, 21 aa, synthetic construct
  REGION 1..21: note = Description of Artificial Sequence: Synthetic peptide
  MOD_RES 1: note = Ac5c
  MOD_RES 3: note = Aib
  MOD_RES 8: note = Nle
  MOD_RES 11: note = hArg
  MOD_RES 18: note = Aib
  MOD_RES 19: note = Lys(C12)
  MOD_RES 21: note = Aib
  REGION 1..21: note = C-term amide
XVXEIQLLHQRARWIQDXKRX

SEQ ID NO: 230 - protein, 21 aa, synthetic construct
  REGION 1..21: note = Description of Artificial Sequence: Synthetic peptide
  MOD_RES 1: note = Ac5c
  MOD_RES 3: note = Aib
  MOD_RES 8: note = Nle
  MOD_RES 11: note = hArg
  MOD_RES 18: note = Aib
  MOD_RES 19: note = Lys(C14)
  MOD_RES 21: note = Aib
  REGION 1..21: note = C-term amide
XVXEIQLLHQRARWIQDXKRX

SEQ ID NO: 231 - protein, 21 aa, synthetic construct
  REGION 1..21: note = Description of Artificial Sequence: Synthetic peptide
  MOD_RES 1: note = Ac5c
  MOD_RES 3: note = Aib
  MOD_RES 8: note = Nle
  MOD_RES 11: note = hArg
  MOD_RES 18: note = Aib
  MOD_RES 19: note = Lys(C16)
  MOD_RES 21: note = Aib
  REGION 1..21: note = C-term amide
XVXEIQLLHQRARWIQDXKRX

SEQ ID NO: 232 - protein, 21 aa, synthetic construct
  REGION 1..21: note = Description of Artificial Sequence: Synthetic peptide
  MOD_RES 1: note = Ac5c
  MOD_RES 3: note = Aib
  MOD_RES 8: note = Nle
  MOD_RES 11: note = hArg
  MOD_RES 18: note = Ac5c
  MOD_RES 19: note = Lys(C12)
  MOD_RES 21: note = Aib
  REGION 1..21: note = C-term amide
XVXEIQLLHQRARWIQDXKRX

SEQ ID NO: 233 - protein, 21 aa, synthetic construct
  REGION 1..21: note = Description of Artificial Sequence: Synthetic peptide
  MOD_RES 1: note = Ac5c
  MOD_RES 3: note = Aib
  MOD_RES 8: note = Nle
  MOD_RES 11: note = hArg
  MOD_RES 18: note = Ac5c
  MOD_RES 19: note = Lys(C14)
  MOD_RES 21: note = Aib
  REGION 1..21: note = C-term amide
XVXEIQLLHQRARWIQDXKRX

SEQ ID NO: 234 - protein, 21 aa, synthetic construct
  REGION 1..21: note = Description of Artificial Sequence: Synthetic peptide
  MOD_RES 1: note = Ac5c
  MOD_RES 3: note = Aib
  MOD_RES 8: note = Nle
  MOD_RES 11: note = hArg
  MOD_RES 18: note = Ac5c
  MOD_RES 19: note = Lys(C16)
  MOD_RES 21: note = Aib
  REGION 1..21: note = C-term amide
XVXEIQLLHQRARWIQDXKRX

SEQ ID NO: 235 - protein, 21 aa, synthetic construct
  REGION 1..21: note = Description of Artificial Sequence: Synthetic peptide
  MOD_RES 1: note = Ac5c
  MOD_RES 3: note = Aib
  MOD_RES 8: note = Nle
  MOD_RES 11: note = hArg
  MOD_RES 19: note = Lys(C12)
  MOD_RES 21: note = Ac5c
  REGION 1..21: note = C-term amide
XVXEIQLLHQRARWIQDLKRX

SEQ ID NO: 236 - protein, 21 aa, synthetic construct
  REGION 1..21: note = Description of Artificial Sequence: Synthetic peptide
  MOD_RES 1: note = Ac5c
  MOD_RES 3: note = Aib
  MOD_RES 8: note = Nle
  MOD_RES 11: note = hArg
  MOD_RES 19: note = Lys(C14)
  MOD_RES 21: note = Ac5c
  REGION 1..21: note = C-term amide
XVXEIQLLHQRARWIQDLKRX

SEQ ID NO: 237 - protein, 21 aa, synthetic construct
  REGION 1..21: note = Description of Artificial Sequence: Synthetic peptide
  MOD_RES 1: note = Ac5c
  MOD_RES 3: note = Aib
  MOD_RES 8: note = Nle
  MOD_RES 11: note = hArg
  MOD_RES 19: note = Lys(C16)
  MOD_RES 21: note = Ac5c
  REGION 1..21: note = C-term amide
XVXEIQLLHQRARWIQDLKRX

SEQ ID NO: 238 - protein, 21 aa, synthetic construct
  REGION 1..21: note = Description of Artificial Sequence: Synthetic peptide
  MOD_RES 1: note = Ac5c
  MOD_RES 3: note = Aib
  MOD_RES 8: note = Nle
  MOD_RES 11: note = hArg
  MOD_RES 12: note = Aib
  MOD_RES 19: note = Lys(C14)
  MOD_RES 21: note = Ac5c
  REGION 1..21: note = C-term amide
XVXEIQLLHQRXRWIQDLKRX

SEQ ID NO: 239 - protein, 21 aa, synthetic construct
  REGION 1..21: note = Description of Artificial Sequence: Synthetic peptide
  MOD_RES 1: note = Ac5c
  MOD_RES 3: note = Aib
  MOD_RES 8: note = Nle
  MOD_RES 11: note = hArg
  MOD_RES 12: note = Aib
  MOD_RES 19: note = Lys(C16)
  MOD_RES 21: note = Ac5c
  REGION 1..21: note = C-term amide
XVXEIQLLHQRXRWIQDLKRX

SEQ ID NO: 240 - protein, 21 aa, synthetic construct
  REGION 1..21: note = Description of Artificial Sequence: Synthetic peptide
  MOD_RES 1: note = Ac5c
  MOD_RES 3: note = Aib
  MOD_RES 8: note = Nle
  MOD_RES 11: note = hArg
  MOD_RES 12: note = Aib
  MOD_RES 19: note = Lys(C12)
  MOD_RES 21: note = Ac5c
  REGION 1..21: note = C-term amide
XVXEIQLLHQRXRWIQDLKRX

SEQ ID NO: 241 - protein, 21 aa, synthetic construct
  REGION 1..21: note = Description of Artificial Sequence: Synthetic peptide
  MOD_RES 1: note = Ac5c
  MOD_RES 3: note = Aib
  MOD_RES 8: note = Nle
  MOD_RES 11: note = hArg
  MOD_RES 12: note = Aib
  MOD_RES 19: note = Lys(C14)
  MOD_RES 21: note = Aib
  REGION 1..21: note = C-term amide
XVXEIQLLHQRXRWIQDLKRX

SEQ ID NO: 242 - protein, 21 aa, synthetic construct
  REGION 1..21: note = Description of Artificial Sequence: Synthetic peptide
  MOD_RES 1: note = Ac5c
  MOD_RES 3: note = Aib
  MOD_RES 8: note = Nle
  MOD_RES 11: note = hArg
  MOD_RES 12: note = Aib
  MOD_RES 19: note = Lys(C16)
  MOD_RES 21: note = Aib
  REGION 1..21: note = C-term amide
XVXEIQLLHQRXRWIQDLKRX

SEQ ID NO: 243 - protein, 21 aa, synthetic construct
  REGION 1..21: note = Description of Artificial Sequence: Synthetic peptide
  MOD_RES 1: note = Ac5c
  MOD_RES 3: note = Aib
  MOD_RES 8: note = Nle
  MOD_RES 11: note = hArg
  MOD_RES 12: note = Aib
  MOD_RES 18: note = Aib
  MOD_RES 19: note = Lys(C12)
  MOD_RES 21: note = Aib
  REGION 1..21: note = C-term amide
XVXEIQLLHQRXRWIQDXKRX

SEQ ID NO: 244 - protein, 21 aa, synthetic construct
  REGION 1..21: note = Description of Artificial Sequence: Synthetic peptide
  MOD_RES 1: note = Ac5c
  MOD_RES 3: note = Aib
  MOD_RES 8: note = Nle
  MOD_RES 11: note = hArg
  MOD_RES 12: note = Aib
  MOD_RES 18: note = Aib
  MOD_RES 19: note = Lys(C14)
  MOD_RES 21: note = Aib
  REGION 1..21: note = C-term amide
XVXEIQLLHQRXRWIQDXKRX

SEQ ID NO: 245 - protein, 21 aa, synthetic construct
  REGION 1..21: note = Description of Artificial Sequence: Synthetic peptide
  MOD_RES 1: note = Ac5c
  MOD_RES 3: note = Aib
  MOD_RES 8: note = Nle
  MOD_RES 11: note = hArg
  MOD_RES 12: note = Aib
  MOD_RES 18: note = Aib
  MOD_RES 19: note = Lys(C16)
  MOD_RES 21: note = Aib
  REGION 1..21: note = C-term amide
XVXEIQLLHQRXRWIQDXKRX

SEQ ID NO: 246 - protein, 21 aa, synthetic construct
  REGION 1..21: note = Description of Artificial Sequence: Synthetic peptide
  MOD_RES 1: note = Ac5c
  MOD_RES 3: note = Aib
  MOD_RES 8: note = Nle
  MOD_RES 11: note = hArg
  MOD_RES 12: note = Aib
  MOD_RES 18: note = Ac5c
  MOD_RES 19: note = Lys(C12)
  MOD_RES 21: note = Aib
  REGION 1..21: note = C-term amide
XVXEIQLLHQRXRWIQDXKRX

SEQ ID NO: 247 - protein, 21 aa, synthetic construct
  REGION 1..21: note = Description of Artificial Sequence: Synthetic peptide
  MOD_RES 1: note = Ac5c
  MOD_RES 3: note = Aib
  MOD_RES 8: note = Nle
  MOD_RES 11: note = hArg
  MOD_RES 12: note = Aib
  MOD_RES 18: note = Ac5c
  MOD_RES 19: note = Lys(C14)
  MOD_RES 21: note = Aib
  REGION 1..21: note = C-term amide
XVXEIQLLHQRXRWIQDXKRX

SEQ ID NO: 248 - protein, 21 aa, synthetic construct
  REGION 1..21: note = Description of Artificial Sequence: Synthetic peptide
  MOD_RES 1: note = Ac5c
  MOD_RES 3: note = Aib
  MOD_RES 8: note = Nle
  MOD_RES 11: note = hArg
  MOD_RES 12: note = Aib
  MOD_RES 18: note = Ac5c
  MOD_RES 19: note = Lys(C16)
  MOD_RES 21: note = Aib
  REGION 1..21: note = C-term amide
XVXEIQLLHQRXRWIQDXKRX

SEQ ID NO: 249 - protein, 21 aa, synthetic construct
  REGION 1..21: note = Description of Artificial Sequence: Synthetic peptide
  MOD_RES 1: note = Ac5c
  MOD_RES 3: note = Aib
  MOD_RES 11: note = hArg
  MOD_RES 19: note = Lys(C12)
  MOD_RES 21: note = Aib
  REGION 1..21: note = C-term amide
XVXEIQLLHQRARWIQDLKRX

SEQ ID NO: 250 - protein, 21 aa, synthetic construct
  REGION 1..21: note = Description of Artificial Sequence: Synthetic peptide
  MOD_RES 1: note = Ac5c
  MOD_RES 3: note = Aib
  MOD_RES 11: note = hArg
  MOD_RES 19: note = Lys(C14)
  MOD_RES 21: note = Aib
  REGION 1..21: note = C-term amide
XVXEIQLLHQRARWIQDLKRX

SEQ ID NO: 251 - protein, 21 aa, synthetic construct
  REGION 1..21: note = Description of Artificial Sequence: Synthetic peptide
  MOD_RES 1: note = Ac5c
  MOD_RES 3: note = Aib
  MOD_RES 11: note = hArg
  MOD_RES 19: note = Lys(C16)
  MOD_RES 21: note = Aib
  REGION 1..21: note = C-term amide
XVXEIQLLHQRARWIQDLKRX

SEQ ID NO: 252 - protein, 21 aa, synthetic construct
  REGION 1..21: note = Description of Artificial Sequence: Synthetic peptide
  MOD_RES 1: note = Ac5c
  MOD_RES 3: note = Aib
  MOD_RES 11: note = hArg
  MOD_RES 12: note = Aib
  MOD_RES 19: note = Lys(C12)
  MOD_RES 21: note = Aib
  REGION 1..21: note = C-term amide
XVXEIQLLHQRXRWIQDLKRX

SEQ ID NO: 253 - protein, 21 aa, synthetic construct
  REGION 1..21: note = Description of Artificial Sequence: Synthetic peptide
  MOD_RES 1: note = Ac5c
  MOD_RES 3: note = Aib
  MOD_RES 11: note = hArg
  MOD_RES 12: note = Aib
  MOD_RES 19: note = Lys(C14)
  MOD_RES 21: note = Aib
  REGION 1..21: note = C-term amide
XVXEIQLLHQRXRWIQDLKRX

SEQ ID NO: 254 - protein, 21 aa, synthetic construct
  REGION 1..21: note = Description of Artificial Sequence: Synthetic peptide
  MOD_RES 1: note = Ac5c
  MOD_RES 3: note = Aib
  MOD_RES 11: note = hArg
  MOD_RES 12: note = Aib
  MOD_RES 19: note = Lys(C16)
  MOD_RES 21: note = Aib
  REGION 1..21: note = C-term amide
XVXEIQLLHQRXRWIQDLKRX

SEQ ID NO: 255 - protein, 21 aa, synthetic construct
  REGION 1..21: note = Description of Artificial Sequence: Synthetic peptide
  MOD_RES 1: note = Ac5c
  MOD_RES 3: note = Aib
  MOD_RES 11: note = hArg
  MOD_RES 12: note = Aib
  MOD_RES 19: note = Lys(C12)
  MOD_RES 21: note = Aib
  REGION 1..21: note = C-term amide
XVXEIQLLHQRXRWINDLKRX

SEQ ID NO: 256 - protein, 21 aa, synthetic construct
  REGION 1..21: note = Description of Artificial Sequence: Synthetic peptide
  MOD_RES 1: note = Ac5c
  MOD_RES 3: note = Aib
  MOD_RES 11: note = hArg
  MOD_RES 12: note = Aib
  MOD_RES 19: note = Lys(C14)
  MOD_RES 21: note = Aib
  REGION 1..21: note = C-term amide
XVXEIQLLHQRXRWINDLKRX

SEQ ID NO: 257 - protein, 21 aa, synthetic construct
  REGION 1..21: note = Description of Artificial Sequence: Synthetic peptide
  MOD_RES 1: note = Ac5c
  MOD_RES 3: note = Aib
  MOD_RES 11: note = hArg
  MOD_RES 12: note = Aib
  MOD_RES 19: note = Lys(C16)
  MOD_RES 21: note = Aib
  REGION 1..21: note = C-term amide
XVXEIQLLHQRXRWINDLKRX

SEQ ID NO: 258 - protein, 21 aa, synthetic construct
  REGION 1..21: note = Description of Artificial Sequence: Synthetic peptide
  MOD_RES 1: note = Ac5c
  MOD_RES 3: note = Aib
  MOD_RES 8: note = Nle
  MOD_RES 11: note = hArg
  REGION 14..18: note = misc_feature - Cyclic
  MOD_RES 14: note = Lys is cyclized through side chain to form a lactam linkage
  MOD_RES 18: note = Glu is cyclized through side chain to form a lactam linkage
  MOD_RES 19: note = Lys(C12)
  MOD_RES 21: note = Aib
  REGION 1..21: note = C-term amide
XVXEIQLLHQRARKIQDEKRX

SEQ ID NO: 259 - protein, 26 aa, synthetic construct
  REGION 1..26: note = Description of Artificial Sequence: Synthetic peptide
  MOD_RES 1: note = Ac5c
  MOD_RES 3: note = Aib
  MOD_RES 8: note = Nle
  MOD_RES 11: note = hArg
  MOD_RES 12: note = Aib
  REGION 18..22: note = misc_feature - Cyclic
  MOD_RES 18: note = Lys is cyclized through side chain to form a lactam linkage
  MOD_RES 22: note = Glu is cyclized through side chain to form a lactam linkage
  MOD_RES 25: note = Lys(C12)
  MOD_RES 26: note = Aib
  REGION 1..26: note = C-term amide
XVXEIQLLHQRXRWIQDKRRREFLKX

SEQ ID NO: 260 - protein, 19 aa, synthetic construct
  REGION 1..19: note = Description of Artificial Sequence: Synthetic peptide
  MOD_RES 1: note = Ac5c
  MOD_RES 3: note = Aib
  MOD_RES 8: note = Nle
  MOD_RES 11: note = hArg
  MOD_RES 17: note = Aib
  MOD_RES 18: note = Lys(C14)
  MOD_RES 19: note = Aib
  REGION 1..19: note = C-term amide
XVXEIQLLHQRARWIQXKX

SEQ ID NO: 261 - protein, 19 aa, synthetic construct
  REGION 1..19: note = Description of Artificial Sequence: Synthetic peptide
  MOD_RES 1: note = Ac5c
  MOD_RES 3: note = Aib
  MOD_RES 8: note = Nle
  MOD_RES 11: note = hArg
  MOD_RES 17: note = Aib
  MOD_RES 18: note = Lys(C16)
  MOD_RES 19: note = Aib
  REGION 1..19: note = C-term amide
XVXEIQLLHQRARWIQXKX

SEQ ID NO: 262 - protein, 19 aa, synthetic construct
  REGION 1..19: note = Description of Artificial Sequence: Synthetic peptide
  MOD_RES 1: note = Ac5c
  MOD_RES 3: note = Aib
  MOD_RES 8: note = Nle
  MOD_RES 11: note = hArg
  MOD_RES 17: note = Aib
  MOD_RES 18: note = Lys(C18)
  MOD_RES 19: note = Aib
  REGION 1..19: note = C-term amide
XVXEIQLLHQRARWIQXKX

SEQ ID NO: 263 - protein, 19 aa, synthetic construct
  REGION 1..19: note = Description of Artificial Sequence: Synthetic peptide
  MOD_RES 1: note = Ac5c
  MOD_RES 3: note = Aib
  MOD_RES 8: note = Nle
  MOD_RES 11: note = hArg
  MOD_RES 17: note = Aib
  MOD_RES 18: note = Lys(C12)
  MOD_RES 19: note = Aib
  REGION 1..19: note = C-term amide
XVXEIQLLHQRARFIQXKX

SEQ ID NO: 264 - protein, 19 aa, synthetic construct
  REGION 1..19: note = Description of Artificial Sequence: Synthetic peptide
  MOD_RES 1: note = Ac5c
  MOD_RES 3: note = Aib
  MOD_RES 8: note = Nle
  MOD_RES 11: note = hArg
  MOD_RES 17: note = Aib
  MOD_RES 18: note = Lys(C14)
  MOD_RES 19: note = Aib
  REGION 1..19: note = C-term amide
XVXEIQLLHQRARFIQXKX

SEQ ID NO: 265 - protein, 19 aa, synthetic construct
  REGION 1..19: note = Description of Artificial Sequence: Synthetic peptide
  MOD_RES 1: note = Ac5c
  MOD_RES 3: note = Aib
  MOD_RES 8: note = Nle
  MOD_RES 11: note = hArg
  MOD_RES 17: note = Aib
  MOD_RES 18: note = Lys(C16)
  MOD_RES 19: note = Aib
  REGION 1..19: note = C-term amide
XVXEIQLLHQRARFIQXKX

SEQ ID NO: 266 - protein, 19 aa, synthetic construct
  REGION 1..19: note = Description of Artificial Sequence: Synthetic peptide
  MOD_RES 1: note = Ac5c
  MOD_RES 3: note = Aib
  MOD_RES 8: note = Nle
  MOD_RES 11: note = hArg
  MOD_RES 17: note = Aib
  MOD_RES 18: note = Lys(C18)
  MOD_RES 19: note = Aib
  REGION 1..19: note = C-term amide
XVXEIQLLHQRARFIQXKX

SEQ ID NO: 267 - protein, 19 aa, synthetic construct
  REGION 1..19: note = Description of Artificial Sequence: Synthetic peptide
  MOD_RES 1: note = Ac5c
  MOD_RES 3: note = Aib
  MOD_RES 8: note = Nle
  MOD_RES 11: note = hArg
  MOD_RES 14: note = Nal2
  MOD_RES 17: note = Aib
  MOD_RES 18: note = Lys(C12)
  MOD_RES 19: note = Aib
  REGION 1..19: note = C-term amide
XVXEIQLLHQRARAIQXKX

SEQ ID NO: 268 - protein, 19 aa, synthetic construct
  REGION 1..19: note = Description of Artificial Sequence: Synthetic peptide
  MOD_RES 1: note = Ac5c
  MOD_RES 3: note = Aib
  MOD_RES 8: note = Nle
  MOD_RES 11: note = hArg
  MOD_RES 14: note = Nal2
  MOD_RES 17: note = Aib
  MOD_RES 18: note = Lys(C14)
  MOD_RES 19: note = Aib
  REGION 1..19: note = C-term amide
XVXEIQLLHQRARAIQXKX

SEQ ID NO: 269 - protein, 19 aa, synthetic construct
  REGION 1..19: note = Description of Artificial Sequence: Synthetic peptide
  MOD_RES 1: note = Ac5c
  MOD_RES 3: note = Aib
  MOD_RES 8: note = Nle
  MOD_RES 11: note = hArg
  MOD_RES 14: note = Nal2
  MOD_RES 17: note = Aib
  MOD_RES 18: note = Lys(C16)
  MOD_RES 19: note = Aib
  REGION 1..19: note = C-term amide
XVXEIQLLHQRARAIQXKX

SEQ ID NO: 270 - protein, 19 aa, synthetic construct
  REGION 1..19: note = Description of Artificial Sequence: Synthetic peptide
  MOD_RES 1: note = Ac5c
  MOD_RES 3: note = Aib
  MOD_RES 8: note = Nle
  MOD_RES 11: note = hArg
  MOD_RES 14: note = Nal2
  MOD_RES 17: note = Aib
  MOD_RES 18: note = Lys(C18)
  MOD_RES 19: note = Aib
  REGION 1..19: note = C-term amide
XVXEIQLLHQRARAIQXKX

SEQ ID NO: 271 - protein, 19 aa, synthetic construct
  REGION 1..19: note = Description of Artificial Sequence: Synthetic peptide
  MOD_RES 1: note = Ac5c
  MOD_RES 3: note = Aib
  MOD_RES 8: note = Nle
  MOD_RES 11: note = hArg
  REGION 12..16: note = misc_feature - Cyclic
  MOD_RES 12: note = Glu is cyclized through side chain to form a lactam linkage
  MOD_RES 16: note = Lys is cyclized through side chain to form a lactam linkage
  MOD_RES 17: note = Aib
  MOD_RES 18: note = Lys(C12)
  MOD_RES 19: note = Aib
  REGION 1..19: note = C-term amide
XVXEIQLLHQRERWIKXKX

SEQ ID NO: 272 - protein, 19 aa, synthetic construct
  REGION 1..19: note = Description of Artificial Sequence: Synthetic peptide
  MOD_RES 1: note = Ac5c
  MOD_RES 3: note = Aib
  MOD_RES 8: note = Nle
  MOD_RES 11: note = hArg
  REGION 12..16: note = misc_feature - Cyclic
  MOD_RES 12: note = Glu is cyclized through side chain to form a lactam linkage
  MOD_RES 16: note = Lys is cyclized through side chain to form a lactam linkage
  MOD_RES 17: note = Aib
  MOD_RES 18: note = Lys(C14)
  MOD_RES 19: note = Aib
  REGION 1..19: note = C-term amide
XVXEIQLLHQRERWIKXKX

SEQ ID NO: 273 - protein, 19 aa, synthetic construct
  REGION 1..19: note = Description of Artificial Sequence: Synthetic peptide
  MOD_RES 1: note = Ac5c
  MOD_RES 3: note = Aib
  MOD_RES 8: note = Nle
  MOD_RES 11: note = hArg
  REGION 12..16: note = misc_feature - Cyclic
  MOD_RES 12: note = Glu is cyclized through side chain to form a lactam linkage
  MOD_RES 16: note = Lys is cyclized through side chain to form a lactam linkage
  MOD_RES 17: note = Aib
  MOD_RES 18: note = Lys(C16)
  MOD_RES 19: note = Aib
  REGION 1..19: note = C-term amide
XVXEIQLLHQRERWIKXKX

SEQ ID NO: 274 - protein, 19 aa, synthetic construct
  REGION 1..19: note = Description of Artificial Sequence: Synthetic peptide
  MOD_RES 1: note = Ac5c
  MOD_RES 3: note = Aib
  MOD_RES 8: note = Nle
  MOD_RES 11: note = hArg
  REGION 12..16: note = misc_feature - Cyclic
  MOD_RES 12: note = Glu is cyclized through side chain to form a lactam linkage
  MOD_RES 16: note = Lys is cyclized through side chain to form a lactam linkage
  MOD_RES 17: note = Aib
  MOD_RES 18: note = Lys(C18)
  MOD_RES 19: note = Aib
  REGION 1..19: note = C-term amide
XVXEIQLLHQRERWIKXKX

SEQ ID NO: 275 - protein, 20 aa, synthetic construct
  REGION 1..20: note = Description of Artificial Sequence: Synthetic peptide
  MOD_RES 1: note = Ac5c
  MOD_RES 3: note = Aib
  MOD_RES 8: note = Nle
  MOD_RES 11: note = hArg
  MOD_RES 17: note = Aib
  MOD_RES 18: note = Lys(C12)
  MOD_RES 19..20: note = Aib
  REGION 1..20: note = C-term amide
XVXEIQLLHQRARWIQXKXX

SEQ ID NO: 276 - protein, 20 aa, synthetic construct
  REGION 1..20: note = Description of Artificial Sequence: Synthetic peptide
  MOD_RES 1: note = Ac5c
  MOD_RES 3: note = Aib
  MOD_RES 8: note = Nle
  MOD_RES 11: note = hArg
  MOD_RES 17: note = Aib
  MOD_RES 18: note = Lys(C14)
  MOD_RES 19..20: note = Aib
  REGION 1..20: note = C-term amide
XVXEIQLLHQRARWIQXKXX

SEQ ID NO: 277 - protein, 20 aa, synthetic construct
  REGION 1..20: note = Description of Artificial Sequence: Synthetic peptide
  MOD_RES 1: note = Ac5c
  MOD_RES 3: note = Aib
  MOD_RES 8: note = Nle
  MOD_RES 11: note = hArg
  MOD_RES 17: note = Aib
  MOD_RES 18: note = Lys(C16)
  MOD_RES 19..20: note = Aib
  REGION 1..20: note = C-term amide
XVXEIQLLHQRARWIQXKXX

SEQ ID NO: 278 - protein, 20 aa, synthetic construct
  REGION 1..20: note = Description of Artificial Sequence: Synthetic peptide
  MOD_RES 1: note = Ac5c
  MOD_RES 3: note = Aib
  MOD_RES 8: note = Nle
  MOD_RES 11: note = hArg
  MOD_RES 17: note = Aib
  MOD_RES 18: note = Lys(C18)
  MOD_RES 19..20: note = Aib
  REGION 1..20: note = C-term amide
XVXEIQLLHQRARWIQXKXX

SEQ ID NO: 279 - protein, 20 aa, synthetic construct
  REGION 1..20: note = Description of Artificial Sequence: Synthetic peptide
  MOD_RES 1: note = Ac5c
  MOD_RES 3: note = Aib
  MOD_RES 8: note = Nle
  MOD_RES 11: note = hArg
  REGION 12..16: note = misc_feature - Cyclic
  MOD_RES 12: note = Glu is cyclized through side chain to form a lactam linkage
  MOD_RES 16: note = Lys is cyclized through side chain to form a lactam linkage
  MOD_RES 17: note = Aib
  MOD_RES 18: note = Lys(C12)
  MOD_RES 19..20: note = Aib
  REGION 1..20: note = C-term amide
XVXEIQLLHQRERWIKXKXX

SEQ ID NO: 280 - protein, 20 aa, synthetic construct
  REGION 1..20: note = Description of Artificial Sequence: Synthetic peptide
  MOD_RES 1: note = Ac5c
  MOD_RES 3: note = Aib
  MOD_RES 8: note = Nle
  MOD_RES 11: note = hArg
  REGION 12..16: note = misc_feature - Cyclic
  MOD_RES 12: note = Glu is cyclized through side chain to form a lactam linkage
  MOD_RES 16: note = Lys is cyclized through side chain to form a lactam linkage
  MOD_RES 17: note = Aib
  MOD_RES 18: note = Lys(C14)
  MOD_RES 19..20: note = Aib
  REGION 1..20: note = C-term amide
XVXEIQLLHQRERWIKXKXX

SEQ ID NO: 281 - protein, 20 aa, synthetic construct
  REGION 1..20: note = Description of Artificial Sequence: Synthetic peptide
  MOD_RES 1: note = Ac5c
  MOD_RES 3: note = Aib
  MOD_RES 8: note = Nle
  MOD_RES 11: note = hArg
  REGION 12..16: note = misc_feature - Cyclic
  MOD_RES 12: note = Glu is cyclized through side chain to form a lactam linkage
  MOD_RES 16: note = Lys is cyclized through side chain to form a lactam linkage
  MOD_RES 17: note = Aib
  MOD_RES 18: note = Lys(C16)
  MOD_RES 19..20: note = Aib
  REGION 1..20: note = C-term amide
XVXEIQLLHQRERWIKXKXX

SEQ ID NO: 282 - protein, 20 aa, synthetic construct
  REGION 1..20: note = Description of Artificial Sequence: Synthetic peptide
  MOD_RES 1: note = Ac5c
  MOD_RES 3: note = Aib
  MOD_RES 8: note = Nle
  MOD_RES 11: note = hArg
  REGION 12..16: note = misc_feature - Cyclic
  MOD_RES 12: note = Glu is cyclized through side chain to form a lactam linkage
  MOD_RES 16: note = Lys is cyclized through side chain to form a lactam linkage
  MOD_RES 17: note = Aib
  MOD_RES 18: note = Lys(C18)
  MOD_RES 19..20: note = Aib
  REGION 1..20: note = C-term amide
XVXEIQLLHQRERWIKXKXX

SEQ ID NO: 283 - protein, 19 aa, synthetic construct
  REGION 1..19: note = Description of Artificial Sequence: Synthetic peptide
  MOD_RES 1: note = Ac5c
  MOD_RES 3: note = Aib
  MOD_RES 8: note = Nle
  MOD_RES 11: note = hArg
  MOD_RES 17: note = Aib
  MOD_RES 18: note = Lys(N-epsilon-1'-alkyl beta-D-glucuronyl)
  MOD_RES 19: note = Aib
  REGION 1..19: note = C-term NH2
  REGION 1..19: note = see specification as filed for detailed description of substitutions and preferred embodiments
XVXEIQLLHQRARWIQXKX

SEQ ID NO: 284 - protein, 19 aa, synthetic construct
  REGION 1..19: note = Description of Artificial Sequence: Synthetic peptide
  MOD_RES 1: note = Ac5c
  MOD_RES 3: note = Aib
  MOD_RES 8: note = Nle
  MOD_RES 11: note = hArg
  MOD_RES 17: note = Aib
  MOD_RES 18: note = Lys(N-epsilon-1'-alkyl beta-D-glucuronyl)
  MOD_RES 19: note = Ac4c
  REGION 1..19: note = C-term NH2
  REGION 1..19: note = see specification as filed for detailed description of substitutions and preferred embodiments
XVXEIQLLHQRARWIQXKX

SEQ ID NO: 285 - protein, 20 aa, synthetic construct
  REGION 1..20: note = Description of Artificial Sequence: Synthetic peptide
  MOD_RES 1: note = Ac5c
  MOD_RES 3: note = Aib
  MOD_RES 8: note = Nle
  MOD_RES 11: note = hArg
  REGION 16..20: note = misc_feature - Cyclic
  MOD_RES 16: note = Glu is cyclized through side chain to form a lactam linkage
  MOD_RES 17: note = Aib
  MOD_RES 18: note = Lys(N-epsilon-1'-alkyl beta-D-glucuronyl)
  MOD_RES 19: note = Aib
  MOD_RES 20: note = Lys is cyclized through side chain to form a lactam linkage
  REGION 1..20: note = C-term NH2
  REGION 1..20: note = see specification as filed for detailed description of substitutions and preferred embodiments
XVXEIQLLHQRARWIEXKXK

SEQ ID NO: 286 - protein, 19 aa, synthetic construct
  REGION 1..19: note = Description of Artificial Sequence: Synthetic peptide
  MOD_RES 1: note = Ac5c
  MOD_RES 3: note = Aib
  MOD_RES 8: note = Nle
  MOD_RES 11: note = hArg
  REGION 12..16: note = misc_feature - Cyclic
  MOD_RES 12: note = Glu is cyclized through side chain to form a lactam linkage
  MOD_RES 16: note = Lys is cyclized through side chain to form a lactam linkage
  MOD_RES 17: note = Aib
  MOD_RES 18: note = Lys(N-epsilon-1'-alkyl beta-D-glucuronyl)
  MOD_RES 19: note = Aib
  REGION 1..19: note = C-term NH2
  REGION 1..19: note = see specification as filed for detailed description of substitutions and preferred embodiments
XVXEIQLLHQRERWIKXKX

SEQ ID NO: 287 - protein, 19 aa, synthetic construct
  REGION 1..19: note = Description of Artificial Sequence: Synthetic peptide
  MOD_RES 1: note = Ac5c
  MOD_RES 3: note = Aib
  MOD_RES 8: note = Nle
  MOD_RES 11: note = hArg
  MOD_RES 17: note = Aib
  MOD_RES 18: note = Lys(N-epsilon-1'-alkyl beta-D-glucuronyl)
  MOD_RES 19: note = Aib
  REGION 1..19: note = C-term NH2
  REGION 1..19: note = see specification as filed for detailed description of substitutions and preferred embodiments
XVXEIQLLHQRARFIQXKX

SEQ ID NO: 288 - protein, 20 aa, synthetic construct
  REGION 1..20: note = Description of Artificial Sequence: Synthetic peptide
  MOD_RES 1: note = Ac5c
  MOD_RES 3: note = Aib
  MOD_RES 8: note = Nle
  MOD_RES 11: note = hArg
  MOD_RES 17: note = Aib
  MOD_RES 18: note = Lys(N-epsilon-1'-alkyl beta-D-glucuronyl)
  MOD_RES 19..20: note = Aib
  REGION 1..20: note = C-term NH2
  REGION 1..20: note = see specification as filed for detailed description of substitutions and preferred embodiments
XVXEIQLLHQRARWIQXKXX

SEQ ID NO: 289 - protein, 20 aa, synthetic construct
  REGION 1..20: note = Description of Artificial Sequence: Synthetic peptide
  MOD_RES 1: note = Ac5c
  MOD_RES 3: note = Aib
  MOD_RES 8: note = Nle
  MOD_RES 11: note = hArg
  REGION 12..16: note = misc_feature - Cyclic
  MOD_RES 12: note = Glu is cyclized through side chain to form a lactam linkage
  MOD_RES 16: note = Lys is cyclized through side chain to form a lactam linkage
  MOD_RES 17: note = Aib
  MOD_RES 18: note = Lys(N-epsilon-1'-alkyl beta-D-glucuronyl)
  MOD_RES 19..20: note = Aib
  REGION 1..20: note = C-term NH2
  REGION 1..20: note = see specification as filed for detailed description of substitutions and preferred embodiments
XVXEIQLLHQRERWIKXKXX

SEQ ID NO: 290 - protein, 34 aa, unidentified
  REGION 1..34: note = Description of Unknown: PTH hormone polypeptide analog
SVSEIQLMHNLGKHLNSMERVEWLRKKLQDVHNF

SEQ ID NO: 291 - protein, 34 aa, unidentified
  REGION 1..34: note = Description of Unknown: PTH hormone polypeptide analog
AVSEHQLLHDKGKSIQDLRRRFFLHHLIAEIHTA

SEQ ID NO: 292-293 - skipped (2 entries)

SEQ ID NO: 294 - protein, 19 aa, synthetic construct
  REGION 1..19: note = Description of Artificial Sequence: Synthetic peptide
  MOD_RES 1: note = Ac5c
  MOD_RES 3: note = Aib
  MOD_RES 8: note = Nle
  MOD_RES 11: note = hArg
  MOD_RES 17: note = Aib
  MOD_RES 18: note = Lys(N-epsilon-dodecanoyl)
  MOD_RES 19: note = Aib
  REGION 1..19: note = C-term NH2
XVXEIQLLHQRARWIQXKX

SEQ ID NO: 295 - protein, 18 aa, synthetic construct
  REGION 1..18: note = Description of Artificial Sequence: Synthetic peptide
  MOD_RES 1: note = Ac5c
  MOD_RES 3: note = Aib
  MOD_RES 8: note = Nle
  MOD_RES 11: note = hArg
  MOD_RES 17: note = Aib
  MOD_RES 18: note = Lys(N-epsilon-dodecanoyl)
  REGION 1..18: note = C-term NH2
XVXEIQLLHQRARWIQXK

SEQ ID NO: 296 - protein, 19 aa, synthetic construct
  REGION 1..19: note = Description of Artificial Sequence: Synthetic peptide
  MOD_RES 1: note = Ac5c
  MOD_RES 3: note = Aib
  MOD_RES 8: note = Nle
  MOD_RES 11: note = hArg
  MOD_RES 17: note = Aib
  MOD_RES 18: note = Lys(N-epsilon-palmitoyl)
  MOD_RES 19: note = Aib
  REGION 1..19: note = C-term NH2
XVXEIQLLHQRARWIQXKX

SEQ ID NO: 297 - protein, 19 aa, synthetic construct
  REGION 1..19: note = Description of Artificial Sequence: Synthetic peptide
  MOD_RES 1: note = Ac5c
  MOD_RES 3: note = Aib
  MOD_RES 8: note = Nle
  MOD_RES 11: note = hArg
  MOD_RES 17: note = Aib
  MOD_RES 18: note = Lys(N-epsilon-dodecanoyl)
  MOD_RES 19: note = Aib
  REGION 1..19: note = C-term NH2
XVXEIQLLHQRARFIQXKX

SEQ ID NO: 298 - protein, 19 aa, synthetic construct
  REGION 1..19: note = Description of Artificial Sequence: Synthetic peptide
  MOD_RES 1: note = Ac5c
  MOD_RES 3: note = Aib
  MOD_RES 8: note = Nle
  MOD_RES 11: note = hArg
  MOD_RES 17: note = Aib
  MOD_RES 18: note = Lys(N-epsilon-tetradecanoyl)
  MOD_RES 19: note = Aib
  REGION 1..19: note = C-term NH2
XVXEIQLLHQRARWIQXKX

SEQ ID NO: 299 - protein, 20 aa, synthetic construct
  REGION 1..20: note = Description of Artificial Sequence: Synthetic peptide
  MOD_RES 1: note = Ac5c
  MOD_RES 3: note = Aib
  MOD_RES 8: note = Nle
  MOD_RES 11: note = hArg
  MOD_RES 17: note = Aib
  MOD_RES 18: note = Lys(N-epsilon-tetradecanoyl)
  MOD_RES 19..20: note = Aib
  REGION 1..20: note = C-term NH2
XVXEIQLLHQRARWIQXKXX

SEQ ID NO: 300 - protein, 19 aa, synthetic construct
  REGION 1..19: note = Description of Artificial Sequence: Synthetic peptide
  MOD_RES 1: note = Ac5c
  MOD_RES 3: note = Aib
  MOD_RES 8: note = Nle
  MOD_RES 11: note = hArg
  MOD_RES 17: note = Aib
  MOD_RES 18: note = Lys(N-epsilon-(Nalpha-dodecanoyl-L-glutamyl))
  MOD_RES 19: note = Aib
  REGION 1..19: note = C-term NH2
XVXEIQLLHQRARWIQXKX

SEQ ID NO: 301 - protein, 19 aa, synthetic construct
  REGION 1..19: note = Description of Artificial Sequence: Synthetic peptide
  MOD_RES 1: note = Ac5c
  MOD_RES 3: note = Aib
  MOD_RES 8: note = Nle
  MOD_RES 11: note = hArg
  MOD_RES 17: note = Aib
  MOD_RES 18: note = Cys(S-(3-(PEG4-aminoethylacetamide-Cholesterol)))
  MOD_RES 19: note = Aib
  REGION 1..19: note = C-term NH2
XVXEIQLLHQRARWIQXCX

SEQ ID NO: 302 - protein, 18 aa, synthetic construct
  REGION 1..18: note = Description of Artificial Sequence: Synthetic peptide
  MOD_RES 1: note = Ac5c
  MOD_RES 3: note = Aib
  MOD_RES 8: note = Nle
  MOD_RES 11: note = hArg
  MOD_RES 17: note = Aib
  MOD_RES 18: note = Cys(S-(3-(PEG4-aminoethylacetamide-Cholesterol)))
  REGION 1..18: note = C-term NH2
XVXEIQLLHQRARWIQXC

SEQ ID NO: 303-304 - skipped (2 entries)

SEQ ID NO: 305 - protein, 23 aa, synthetic construct
  REGION 1..23: note = Description of Artificial Sequence: Synthetic peptide
  MOD_RES 2: note = Ser, Ala, Gly, Aib, Ac4c or Ac5c
  MOD_RES 3: note = Gln or Cit
  MOD_RES 6: note = Phe, Trp, F2Phe, Me2Phe, MePhe or Nal2
  MOD_RES 10: note = Tyr, Leu, Met, Nal2, Bip or Bip2EtMeO
  MOD_RES 11: note = Ser, Asn or U(X); wherein "U(X)" is a natural or unnatural amino acid comprising a functional group covalently attached to the surfactant X
  MOD_RES 12: note = Lys, Glu, Ser or U(X); wherein "U(X)" is a natural or unnatural amino acid comprising a functional group covalently attached to the surfactant X
  MOD_RES 13: note = Absent or Tyr, Gln, Cit or U(X); wherein "U(X)" is a natural or unnatural amino acid comprising a functional group covalently attached to the surfactant X
  MOD_RES 14: note = Absent or Leu, Met, Nle or U(X); wherein "U(X)" is a natural or unnatural amino acid comprising a functional group covalently attached to the surfactant X
  MOD_RES 15: note = Absent or Asp, Glu or U(X); wherein "U(X)" is a natural or unnatural amino acid comprising a functional group covalently attached to the surfactant X
  MOD_RES 16: note = Absent or Ser, Gly, Glu, Aib, Ac5c, Lys, Arg or U(X); wherein "U(X)" is a natural or unnatural amino acid comprising a functional group covalently attached to the surfactant X
  MOD_RES 17: note = Absent or Arg, hArg, Gln, Glu, Cit, Aib, Ac4c, Ac5c or U(X); wherein "U(X)" is a natural or unnatural amino acid comprising a functional group covalently attached to the surfactant X
  MOD_RES 18: note = Absent or Arg, hArg, Ala, Aib, Ac4c, Ac5c or U(X); wherein "U(X)" is a natural or unnatural amino acid comprising a functional group covalently attached to the surfactant X
  MOD_RES 19: note = Absent or Ala, Val, Aib, Ac4c, Ac5c or U(X); wherein "U(X)" is a natural or unnatural amino acid comprising a functional group covalently attached to the surfactant X
  MOD_RES 20: note = Absent or Gln, Lys, Arg, Cit, Glu, Aib, Ac4c, Ac5c or U(X); wherein "U(X)" is a natural or unnatural amino acid comprising a functional group covalently attached to the surfactant X
  MOD_RES 21: note = Absent or Asp, Glu, Leu, Aib, Ac4c, Ac5c or U(X); wherein "U(X)" is a natural or unnatural amino acid comprising a functional group covalently attached to the surfactant X
  MOD_RES 22: note = Absent or Phe, Aib, Ac4c, Ac5c or U(X); wherein "U(X)" is a natural or unnatural amino acid comprising a functional group covalently attached to the surfactant X
  MOD_RES 23: note = Absent or Val, Ile, Aib, Ac4c, Ac5c or U(X); wherein "U(X)" is a natural or unnatural amino acid comprising a functional group covalently attached to the surfactant X
  REGION 1..23: note = C-term OH, or -NH-R3, wherein R3 is H or substituted or unsubstituted C1-C12 alkyl; or a PEG chain of less than 10Da
  REGION 1..23: note = see specification as filed for detailed description of substitutions and preferred embodiments
HXXGTXTSDXXXXXXXXXXXXXX

SEQ ID NO: 306 - protein, 11 aa, synthetic construct
  REGION 1..11: note = Description of Artificial Sequence: Synthetic peptide
  MOD_RES 2: note = Aib
  MOD_RES 11: note = Lys(C8)
  REGION 1..11: note = C-term amide
HXQGTFTSDLK

SEQ ID NO: 307 - protein, 11 aa, synthetic construct
  REGION 1..11: note = Description of Artificial Sequence: Synthetic peptide
  MOD_RES 2: note = Aib
  MOD_RES 11: note = Lys(C12)
  REGION 1..11: note = C-term amide
HXQGTFTSDLK

SEQ ID NO: 308 - protein, 11 aa, synthetic construct
  REGION 1..11: note = Description of Artificial Sequence: Synthetic peptide
  MOD_RES 2: note = Aib
  MOD_RES 11: note = Lys(C16)
  REGION 1..11: note = C-term amide
HXQGTFTSDLK

SEQ ID NO: 309 - protein, 11 aa, synthetic construct
  REGION 1..11: note = Description of Artificial Sequence: Synthetic peptide
  MOD_RES 2: note = Aib
  MOD_RES 10: note = Bip
  MOD_RES 11: note = Lys(C8)
  REGION 1..11: note = C-term amide
HXQGTFTSDXK

SEQ ID NO: 310 - protein, 11 aa, synthetic construct
  REGION 1..11: note = Description of Artificial Sequence: Synthetic peptide
  MOD_RES 2: note = Aib
  MOD_RES 10: note = Bip
  MOD_RES 11: note = Lys(C12)
  REGION 1..11: note = C-term amide
HXQGTFTSDXK

SEQ ID NO: 311 - protein, 11 aa, synthetic construct
  REGION 1..11: note = Description of Artificial Sequence: Synthetic peptide
  MOD_RES 2: note = Aib
  MOD_RES 10: note = Bip
  MOD_RES 11: note = Lys(C16)
  REGION 1..11: note = C-term amide
HXQGTFTSDXK

SEQ ID NO: 312 - protein, 11 aa, synthetic construct
  REGION 1..11: note = Description of Artificial Sequence: Synthetic peptide
  MOD_RES 2: note = Aib
  MOD_RES 10: note = Nal(2)
  MOD_RES 11: note = Lys(C8)
  REGION 1..11: note = C-term amide
HXQGTFTSDAK

SEQ ID NO: 313 - protein, 11 aa, synthetic construct
  REGION 1..11: note = Description of Artificial Sequence: Synthetic peptide
  MOD_RES 2: note = Aib
  MOD_RES 10: note = Nal(2)
  MOD_RES 11: note = Lys(C12)
  REGION 1..11: note = C-term amide
HXQGTFTSDAK

SEQ ID NO: 314 - protein, 11 aa, synthetic construct
  REGION 1..11: note = Description of Artificial Sequence: Synthetic peptide
  MOD_RES 2: note = Aib
  MOD_RES 10: note = Nal(2)
  MOD_RES 11: note = Lys(C16)
  REGION 1..11: note = C-term amide
HXQGTFTSDAK

SEQ ID NO: 315 - protein, 11 aa, synthetic construct
  REGION 1..11: note = Description of Artificial Sequence: Synthetic peptide
  MOD_RES 2: note = Aib
  MOD_RES 6: note = 2,6F-Phe
  MOD_RES 10: note = Bip2Et4MeO
  MOD_RES 11: note = Lys(C8)
  REGION 1..11: note = C-term amide
HXQGTFTSDXK

SEQ ID NO: 316 - protein, 11 aa, synthetic construct
  REGION 1..11: note = Description of Artificial Sequence: Synthetic peptide
  MOD_RES 2: note = Aib
  MOD_RES 6: note = 2,6F-Phe
  MOD_RES 10: note = Bip2Et4MeO
  MOD_RES 11: note = Lys(C12)
  REGION 1..11: note = C-term amide
HXQGTFTSDXK

SEQ ID NO: 317 - protein, 11 aa, synthetic construct
  REGION 1..11: note = Description of Artificial Sequence: Synthetic peptide
  MOD_RES 2: note = Aib
  MOD_RES 6: note = 2,6F-Phe
  MOD_RES 10: note = Bip2Et4MeO
  MOD_RES 11: note = Lys(C16)
  REGION 1..11: note = C-term amide
HXQGTFTSDXK

SEQ ID NO: 318 - protein, 15 aa, synthetic construct
  REGION 1..15: note = Description of Artificial Sequence: Synthetic peptide
  MOD_RES 2: note = Aib
  MOD_RES 15: note = Lys(C8)
  REGION 1..15: note = C-term amide
HXQGTFTSDLSKYLK

SEQ ID NO: 319 - protein, 15 aa, synthetic construct
  REGION 1..15: note = Description of Artificial Sequence: Synthetic peptide
  MOD_RES 2: note = Aib
  MOD_RES 15: note = Lys(C12)
  REGION 1..15: note = C-term amide
HXQGTFTSDLSKYLK

SEQ ID NO: 320 - protein, 15 aa, synthetic construct
  REGION 1..15: note = Description of Artificial Sequence: Synthetic peptide
  MOD_RES 2: note = Aib
  MOD_RES 15: note = Lys(C16)
  REGION 1..15: note = C-term amide
HXQGTFTSDLSKYLK

SEQ ID NO: 321 - protein, 15 aa, synthetic construct
  REGION 1..15: note = Description of Artificial Sequence: Synthetic peptide
  MOD_RES 2: note = Aib
  MOD_RES 10: note = Bip
  MOD_RES 15: note = Lys(C8)
  REGION 1..15: note = C-term amide
HXQGTFTSDXSKYLK

SEQ ID NO: 322 - protein, 15 aa, synthetic construct
  REGION 1..15: note = Description of Artificial Sequence: Synthetic peptide
  MOD_RES 2: note = Aib
  MOD_RES 10: note = Bip
  MOD_RES 15: note = Lys(C12)
  REGION 1..15: note = C-term amide
HXQGTFTSDXSKYLK

SEQ ID NO: 323 - protein, 15 aa, synthetic construct
  REGION 1..15: note = Description of Artificial Sequence: Synthetic peptide
  MOD_RES 2: note = Aib
  MOD_RES 10: note = Bip
  MOD_RES 15: note = Lys(C16)
  REGION 1..15: note = C-term amide
HXQGTFTSDXSKYLK

SEQ ID NO: 324 - protein, 15 aa, synthetic construct
  REGION 1..15: note = Description of Artificial Sequence: Synthetic peptide
  MOD_RES 2: note = Aib
  MOD_RES 10: note = Nal(2)
  MOD_RES 15: note = Lys(C8)
  REGION 1..15: note = C-term amide
HXQGTFTSDASKYLK

SEQ ID NO: 325 - protein, 15 aa, synthetic construct
  REGION 1..15: note = Description of Artificial Sequence: Synthetic peptide
  MOD_RES 2: note = Aib
  MOD_RES 10: note = Nal(2)
  MOD_RES 15: note = Lys(C12)
  REGION 1..15: note = C-term amide
HXQGTFTSDASKYLK

SEQ ID NO: 326 - protein, 15 aa, synthetic construct
  REGION 1..15: note = Description of Artificial Sequence: Synthetic peptide
  MOD_RES 2: note = Aib
  MOD_RES 10: note = Nal(2)
  MOD_RES 15: note = Lys(C16)
  REGION 1..15: note = C-term amide
HXQGTFTSDASKYLK

SEQ ID NO: 327 - protein, 15 aa, synthetic construct
  REGION 1..15: note = Description of Artificial Sequence: Synthetic peptide
  MOD_RES 2: note = Aib
  MOD_RES 6: note = 2,6F-Phe
  MOD_RES 10: note = Bip2Et4MeO
  MOD_RES 15: note = Lys(C8)
  REGION 1..15: note = C-term amide
HXQGTFTSDXSKYLK

SEQ ID NO: 328 - protein, 15 aa, synthetic construct
  REGION 1..15: note = Description of Artificial Sequence: Synthetic peptide
  MOD_RES 2: note = Aib
  MOD_RES 6: note = 2,6F-Phe
  MOD_RES 10: note = Bip2Et4MeO
  MOD_RES 15: note = Lys(C12)
  REGION 1..15: note = C-term amide
HXQGTFTSDXSKYLK

SEQ ID NO: 329 - protein, 15 aa, synthetic construct
  REGION 1..15: note = Description of Artificial Sequence: Synthetic peptide
  MOD_RES 2: note = Aib
  MOD_RES 6: note = 2,6F-Phe
  MOD_RES 10: note = Bip2Et4MeO
  MOD_RES 15: note = Lys(C16)
  REGION 1..15: note = C-term amide
HXQGTFTSDXSKYLK

SEQ ID NO: 330 - protein, 18 aa, synthetic construct
  REGION 1..18: note = Description of Artificial Sequence: Synthetic peptide
  MOD_RES 2: note = Aib
  MOD_RES 18: note = Lys(C8)
  REGION 1..18: note = C-term amide
HXQGTFTSDVSKYLDGRK

SEQ ID NO: 331 - protein, 18 aa, synthetic construct
  REGION 1..18: note = Description of Artificial Sequence: Synthetic peptide
  MOD_RES 2: note = Aib
  MOD_RES 18: note = Lys(C8)
  REGION 1..18: note = C-term amide
HXQGTFTSDLSKYLDGRK

SEQ ID NO: 332 - protein, 18 aa, synthetic construct
  REGION 1..18: note = Description of Artificial Sequence: Synthetic peptide
  MOD_RES 2: note = Aib
  MOD_RES 18: note = Lys(C12)
  REGION 1..18: note = C-term amide
HXQGTFTSDLSKYLDGRK

SEQ ID NO: 333 - protein, 18 aa, synthetic construct
  REGION 1..18: note = Description of Artificial Sequence: Synthetic peptide
  MOD_RES 2: note = Aib
  MOD_RES 18: note = Lys(C16)
  REGION 1..18: note = C-term amide
HXQGTFTSDLSKYLDGRK

SEQ ID NO: 334 - protein, 18 aa, synthetic construct
  REGION 1..18: note = Description of Artificial Sequence: Synthetic peptide
  MOD_RES 2: note = Aib
  MOD_RES 10: note = Bip
  MOD_RES 18: note = Lys(C8)
  REGION 1..18: note = C-term amide
HXQGTFTSDXSKYLDGRK

SEQ ID NO: 335 - protein, 18 aa, synthetic construct
  REGION 1..18: note = Description of Artificial Sequence: Synthetic peptide
  MOD_RES 2: note = Aib
  MOD_RES 10: note = Bip
  MOD_RES 18: note = Lys(C12)
  REGION 1..18: note = C-term amide
HXQGTFTSDXSKYLDGRK

SEQ ID NO: 336 - protein, 18 aa, synthetic construct
  REGION 1..18: note = Description of Artificial Sequence: Synthetic peptide
  MOD_RES 2: note = Aib
  MOD_RES 10: note = Bip
  MOD_RES 18: note = Lys(C16)
  REGION 1..18: note = C-term amide
HXQGTFTSDXSKYLDGRK

SEQ ID NO: 337 - protein, 18 aa, synthetic construct
  REGION 1..18: note = Description of Artificial Sequence: Synthetic peptide
  MOD_RES 2: note = Aib
  MOD_RES 10: note = Nal(2)
  MOD_RES 18: note = Lys(C8)
  REGION 1..18: note = C-term amide
HXQGTFTSDASKYLDGRK

SEQ ID NO: 338 - protein, 18 aa, synthetic construct
  REGION 1..18: note = Description of Artificial Sequence: Synthetic peptide
  MOD_RES 2: note = Aib
  MOD_RES 10: note = Nal(2)
  MOD_RES 18: note = Lys(C12)
  REGION 1..18: note = C-term amide
HXQGTFTSDASKYLDGRK

SEQ ID NO: 339 - protein, 18 aa, synthetic construct
  REGION 1..18: note = Description of Artificial Sequence: Synthetic peptide
  MOD_RES 2: note = Aib
  MOD_RES 10: note = Nal(2)
  MOD_RES 18: note = Lys(C16)
  REGION 1..18: note = C-term amide
HXQGTFTSDASKYLDGRK

SEQ ID NO: 340 - protein, 18 aa, synthetic construct
  REGION 1..18: note = Description of Artificial Sequence: Synthetic peptide
  MOD_RES 2: note = Aib
  MOD_RES 6: note = 2,6F-Phe
  MOD_RES 10: note = Bip2Et4MeO
  MOD_RES 18: note = Lys(C8)
  REGION 1..18: note = C-term amide
HXQGTFTSDXSKYLDGRK

SEQ ID NO: 341 - protein, 18 aa, synthetic construct
  REGION 1..18: note = Description of Artificial Sequence: Synthetic peptide
  MOD_RES 2: note = Aib
  MOD_RES 6: note = 2,6F-Phe
  MOD_RES 10: note = Bip2Et4MeO
  MOD_RES 18: note = Lys(C12)
  REGION 1..18: note = C-term amide
HXQGTFTSDXSKYLDGRK

SEQ ID NO: 342 - protein, 18 aa, synthetic construct
  REGION 1..18: note = Description of Artificial Sequence: Synthetic peptide
  MOD_RES 2: note = Aib
  MOD_RES 6: note = 2,6F-Phe
  MOD_RES 10: note = Bip2Et4MeO
  MOD_RES 18: note = Lys(C16)
  REGION 1..18: note = C-term amide
HXQGTFTSDXSKYLDGRK

SEQ ID NO: 343 - protein, 11 aa, synthetic construct
  REGION 1..11: note = Description of Artificial Sequence: Synthetic peptide
  MOD_RES 2: note = Aib
  MOD_RES 11: note = Lys(C8)
  REGION 1..11: note = C-term amide
HXQGTFTSDLK

SEQ ID NO: 344 - protein, 11 aa, synthetic construct
  REGION 1..11: note = Description of Artificial Sequence: Synthetic peptide
  MOD_RES 2: note = Aib
  MOD_RES 11: note = Lys(C12)
  REGION 1..11: note = C-term amide
HXQGTFTSDLK

SEQ ID NO: 345 - protein, 11 aa, synthetic construct
  REGION 1..11: note = Description of Artificial Sequence: Synthetic peptide
  MOD_RES 2: note = Aib
  MOD_RES 11: note = Lys(C16)
  REGION 1..11: note = C-term amide
HXQGTFTSDLK

SEQ ID NO: 346 - protein, 11 aa, synthetic construct
  REGION 1..11: note = Description of Artificial Sequence: Synthetic peptide
  MOD_RES 2: note = Aib
  MOD_RES 10: note = Bip
  MOD_RES 11: note = Lys(C8)
  REGION 1..11: note = C-term amide
HXQGTFTSDXK

SEQ ID NO: 347 - protein, 11 aa, synthetic construct
  REGION 1..11: note = Description of Artificial Sequence: Synthetic peptide
  MOD_RES 2: note = Aib
  MOD_RES 10: note = Bip
  MOD_RES 11: note = Lys(C12)
  REGION 1..11: note = C-term amide
HXQGTFTSDXK

SEQ ID NO: 348 - protein, 11 aa, synthetic construct
  REGION 1..11: note = Description of Artificial Sequence: Synthetic peptide
  MOD_RES 2: note = Aib
  MOD_RES 10: note = Bip
  MOD_RES 11: note = Lys(C16)
  REGION 1..11: note = C-term amide
HXQGTFTSDXK

SEQ ID NO: 349 - protein, 11 aa, synthetic construct
  REGION 1..11: note = Description of Artificial Sequence: Synthetic peptide
  MOD_RES 2: note = Aib
  MOD_RES 10: note = Nal(2)
  MOD_RES 11: note = Lys(C8)
  REGION 1..11: note = C-term amide
HXQGTFTSDAK

SEQ ID NO: 350 - protein, 11 aa, synthetic construct
  REGION 1..11: note = Description of Artificial Sequence: Synthetic peptide
  MOD_RES 2: note = Aib
  MOD_RES 10: note = Nal(2)
  MOD_RES 11: note = Lys(C12)
  REGION 1..11: note = C-term amide
HXQGTFTSDAK

SEQ ID NO: 351 - protein, 11 aa, synthetic construct
  REGION 1..11: note = Description of Artificial Sequence: Synthetic peptide
  MOD_RES 2: note = Aib
  MOD_RES 10: note = Nal(2)
  MOD_RES 11: note = Lys(C16)
  REGION 1..11: note = C-term amide
HXQGTFTSDAK

SEQ ID NO: 352 - protein, 11 aa, synthetic construct
  REGION 1..11: note = Description of Artificial Sequence: Synthetic peptide
  MOD_RES 2: note = Aib
  MOD_RES 6: note = 2,6F-Phe
  MOD_RES 10: note = Bip2Et4MeO
  MOD_RES 11: note = Lys(C8)
  REGION 1..11: note = C-term amide
HXQGTFTSDXK

SEQ ID NO: 353 - protein, 11 aa, synthetic construct
  REGION 1..11: note = Description of Artificial Sequence: Synthetic peptide
  MOD_RES 2: note = Aib
  MOD_RES 6: note = 2,6F-Phe
  MOD_RES 10: note = Bip2Et4MeO
  MOD_RES 11: note = Lys(C12)
  REGION 1..11: note = C-term amide
HXQGTFTSDXK

SEQ ID NO: 354 - protein, 11 aa, synthetic construct
  REGION 1..11: note = Description of Artificial Sequence: Synthetic peptide
  MOD_RES 2: note = Aib
  MOD_RES 6: note = 2,6F-Phe
  MOD_RES 10: note = Bip2Et4MeO
  MOD_RES 11: note = Lys(C16)
  REGION 1..11: note = C-term amide
HXQGTFTSDXK

SEQ ID NO: 355 - protein, 11 aa, synthetic construct
  REGION 1..11: note = Description of Artificial Sequence: Synthetic peptide
  MOD_RES 2: note = Aib
  MOD_RES 6: note = 2,6Me-Phe
  MOD_RES 10: note = Bip
  MOD_RES 11: note = Lys(C8)
  REGION 1..11: note = C-term amide
HXQGTFTSDXK

SEQ ID NO: 356 - protein, 11 aa, synthetic construct
  REGION 1..11: note = Description of Artificial Sequence: Synthetic peptide
  MOD_RES 2: note = Aib
  MOD_RES 6: note = 2,6Me-Phe
  MOD_RES 10: note = Bip
  MOD_RES 11: note = Lys(C12)
  REGION 1..11: note = C-term amide
HXQGTFTSDXK

SEQ ID NO: 357 - protein, 11 aa, synthetic construct
  REGION 1..11: note = Description of Artificial Sequence: Synthetic peptide
  MOD_RES 2: note = Aib
  MOD_RES 6: note = 2,6Me-Phe
  MOD_RES 10: note = Bip
  MOD_RES 11: note = Lys(C16)
  REGION 1..11: note = C-term amide
HXQGTFTSDXK

SEQ ID NO: 358 - protein, 15 aa, synthetic construct
  REGION 1..15: note = Description of Artificial Sequence: Synthetic peptide
  MOD_RES 2: note = Aib
  MOD_RES 6: note = Me-Phe
  MOD_RES 15: note = Lys(C8)
  REGION 1..15: note = C-term amide
HXQGTFTSDLSKYLK

SEQ ID NO: 359 - protein, 15 aa, synthetic construct
  REGION 1..15: note = Description of Artificial Sequence: Synthetic peptide
  MOD_RES 2: note = Aib
  MOD_RES 6: note = Me-Phe
  MOD_RES 15: note = Lys(C12)
  REGION 1..15: note = C-term amide
HXQGTFTSDLSKYLK

SEQ ID NO: 360 - protein, 15 aa, synthetic construct
  REGION 1..15: note = Description of Artificial Sequence: Synthetic peptide
  MOD_RES 2: note = Aib
  MOD_RES 6: note = Me-Phe
  MOD_RES 15: note = Lys(C16)
  REGION 1..15: note = C-term amide
HXQGTFTSDLSKYLK

SEQ ID NO: 361 - protein, 15 aa, synthetic construct
  REGION 1..15: note = Description of Artificial Sequence: Synthetic peptide
  MOD_RES 2: note = Aib
  MOD_RES 6: note = Me-Phe
  MOD_RES 10: note = Bip
  MOD_RES 15: note = Lys(C8)
  REGION 1..15: note = C-term amide
HXQGTFTSDXSKYLK

SEQ ID NO: 362 - protein, 15 aa, synthetic construct
  REGION 1..15: note = Description of Artificial Sequence: Synthetic peptide
  MOD_RES 2: note = Aib
  MOD_RES 6: note = Me-Phe
  MOD_RES 10: note = Bip
  MOD_RES 15: note = Lys(C12)
  REGION 1..15: note = C-term amide
HXQGTFTSDXSKYLK

SEQ ID NO: 363 - protein, 15 aa, synthetic construct
  REGION 1..15: note = Description of Artificial Sequence: Synthetic peptide
  MOD_RES 2: note = Aib
  MOD_RES 6: note = Me-Phe
  MOD_RES 10: note = Bip
  MOD_RES 15: note = Lys(C16)
  REGION 1..15: note = C-term amide
HXQGTFTSDXSKYLK

SEQ ID NO: 364 - protein, 15 aa, synthetic construct
  REGION 1..15: note = Description of Artificial Sequence: Synthetic peptide
  MOD_RES 2: note = Aib
  MOD_RES 6: note = Me-Phe
  MOD_RES 10: note = Nal(2)
  MOD_RES 15: note = Lys(C8)
  REGION 1..15: note = C-term amide
HXQGTFTSDASKYLK

SEQ ID NO: 365 - protein, 15 aa, synthetic construct
  REGION 1..15: note = Description of Artificial Sequence: Synthetic peptide
  MOD_RES 2: note = Aib
  MOD_RES 6: note = Me-Phe
  MOD_RES 10: note = Nal(2)
  MOD_RES 15: note = Lys(C12)
  REGION 1..15: note = C-term amide
HXQGTFTSDASKYLK

SEQ ID NO: 366 - protein, 15 aa, synthetic construct
  REGION 1..15: note = Description of Artificial Sequence: Synthetic peptide
  MOD_RES 2: note = Aib
  MOD_RES 6: note = Me-Phe
  MOD_RES 10: note = Nal(2)
  MOD_RES 15: note = Lys(C16)
  REGION 1..15: note = C-term amide
HXQGTFTSDASKYLK

SEQ ID NO: 367 - protein, 15 aa, synthetic construct
  REGION 1..15: note = Description of Artificial Sequence: Synthetic peptide
  MOD_RES 2: note = Aib
  MOD_RES 6: note = Me-Phe
  MOD_RES 10: note = Bip2Et4MeO
  MOD_RES 15: note = Lys(C8)
  REGION 1..15: note = C-term amide
HXQGTFTSDXSKYLK

SEQ ID NO: 368 - protein, 15 aa, synthetic construct
  REGION 1..15: note = Description of Artificial Sequence: Synthetic peptide
  MOD_RES 2: note = Aib
  MOD_RES 6: note = Me-Phe
  MOD_RES 10: note = Bip2Et4MeO
  MOD_RES 15: note = Lys(C12)
  REGION 1..15: note = C-term amide
HXQGTFTSDXSKYLK

SEQ ID NO: 369 - protein, 15 aa, synthetic construct
  REGION 1..15: note = Description of Artificial Sequence: Synthetic peptide
  MOD_RES 2: note = Aib
  MOD_RES 6: note = Me-Phe
  MOD_RES 10: note = Bip2Et4MeO
  MOD_RES 15: note = Lys(C16)
  REGION 1..15: note = C-term amide
HXQGTFTSDXSKYLK

SEQ ID NO: 370 - protein, 17 aa, synthetic construct
  REGION 1..17: note = Description of Artificial Sequence: Synthetic peptide
  MOD_RES 2: note = Aib
  MOD_RES 17: note = Lys(C8)
  REGION 1..17: note = C-term amide
HXQGTFTSDVSKYLESK

SEQ ID NO: 371 - protein, 17 aa, synthetic construct
  REGION 1..17: note = Description of Artificial Sequence: Synthetic peptide
  MOD_RES 2: note = Aib
  MOD_RES 17: note = Lys(C8)
  REGION 1..17: note = C-term amide
HXQGTFTSDLSKYLESK

SEQ ID NO: 372 - protein, 17 aa, synthetic construct
  REGION 1..17: note = Description of Artificial Sequence: Synthetic peptide
  MOD_RES 2: note = Aib
  MOD_RES 17: note = Lys(C12)
  REGION 1..17: note = C-term amide
HXQGTFTSDLSKYLESK

SEQ ID NO: 373 - protein, 17 aa, synthetic construct
  REGION 1..17: note = Description of Artificial Sequence: Synthetic peptide
  MOD_RES 2: note = Aib
  MOD_RES 17: note = Lys(C16)
  REGION 1..17: note = C-term amide
HXQGTFTSDLSKYLESK

SEQ ID NO: 374 - protein, 17 aa, synthetic construct
  REGION 1..17: note = Description of Artificial Sequence: Synthetic peptide
  MOD_RES 2: note = Aib
  MOD_RES 10: note = Bip
  MOD_RES 17: note = Lys(C8)
  REGION 1..17: note = C-term amide
HXQGTFTSDXSKYLESK

SEQ ID NO: 375 - protein, 17 aa, synthetic construct
  REGION 1..17: note = Description of Artificial Sequence: Synthetic peptide
  MOD_RES 2: note = Aib
  MOD_RES 10: note = Bip
  MOD_RES 17: note = Lys(C12)
  REGION 1..17: note = C-term amide
HXQGTFTSDXSKYLESK

SEQ ID NO: 376 - protein, 17 aa, synthetic construct
  REGION 1..17: note = Description of Artificial Sequence: Synthetic peptide
  MOD_RES 2: note = Aib
  MOD_RES 10: note = Bip
  MOD_RES 17: note = Lys(C16)
  REGION 1..17: note = C-term amide
HXQGTFTSDXSKYLESK

SEQ ID NO: 377 - protein, 17 aa, synthetic construct
  REGION 1..17: note = Description of Artificial Sequence: Synthetic peptide
  MOD_RES 2: note = Aib
  MOD_RES 10: note = Nal(2)
  MOD_RES 17: note = Lys(C8)
  REGION 1..17: note = C-term amide
HXQGTFTSDASKYLESK

SEQ ID NO: 378 - protein, 17 aa, synthetic construct
  REGION 1..17: note = Description of Artificial Sequence: Synthetic peptide
  MOD_RES 2: note = Aib
  MOD_RES 10: note = Nal(2)
  MOD_RES 17: note = Lys(C12)
  REGION 1..17: note = C-term amide
HXQGTFTSDASKYLESK

SEQ ID NO: 379 - protein, 17 aa, synthetic construct
  REGION 1..17: note = Description of Artificial Sequence: Synthetic peptide
  MOD_RES 2: note = Aib
  MOD_RES 10: note = Nal(2)
  MOD_RES 17: note = Lys(C16)
  REGION 1..17: note = C-term amide
HXQGTFTSDASKYLESK

SEQ ID NO: 380 - protein, 17 aa, synthetic construct
  REGION 1..17: note = Description of Artificial Sequence: Synthetic peptide
  MOD_RES 2: note = Aib
  MOD_RES 6: note = 2,6F-Phe
  MOD_RES 10: note = Bip2Et4MeO
  MOD_RES 17: note = Lys(C8)
  REGION 1..17: note = C-term amide
HXQGTFTSDXSKYLESK

SEQ ID NO: 381 - protein, 17 aa, synthetic construct
  REGION 1..17: note = Description of Artificial Sequence: Synthetic peptide
  MOD_RES 2: note = Aib
  MOD_RES 6: note = 2,6F-Phe
  MOD_RES 10: note = Bip2Et4MeO
  MOD_RES 17: note = Lys(C12)
  REGION 1..17: note = C-term amide
HXQGTFTSDXSKYLESK

SEQ ID NO: 382 - protein, 17 aa, synthetic construct
  REGION 1..17: note = Description of Artificial Sequence: Synthetic peptide
  MOD_RES 2: note = Aib
  MOD_RES 6: note = 2,6F-Phe
  MOD_RES 10: note = Bip2Et4MeO
  MOD_RES 17: note = Lys(C16)
  REGION 1..17: note = C-term amide
HXQGTFTSDXSKYLESK

SEQ ID NO: 383 - protein, 17 aa, synthetic construct
  REGION 1..17: note = Description of Artificial Sequence: Synthetic peptide
  MOD_RES 2: note = Aib
  MOD_RES 10: note = Bip
  MOD_RES 17: note = Lys(C8)
  REGION 1..17: note = C-term amide
HXQGTFTSDXSKYLDSK

SEQ ID NO: 384 - protein, 17 aa, synthetic construct
  REGION 1..17: note = Description of Artificial Sequence: Synthetic peptide
  MOD_RES 2: note = Aib
  MOD_RES 10: note = Bip
  MOD_RES 17: note = Lys(C12)
  REGION 1..17: note = C-term amide
HXQGTFTSDXSKYLDSK

SEQ ID NO: 385 - protein, 17 aa, synthetic construct
  REGION 1..17: note = Description of Artificial Sequence: Synthetic peptide
  MOD_RES 2: note = Aib
  MOD_RES 10: note = Bip
  MOD_RES 17: note = Lys(C16)
  REGION 1..17: note = C-term amide
HXQGTFTSDXSKYLDSK

SEQ ID NO: 386 - protein, 17 aa, synthetic construct
  REGION 1..17: note = Description of Artificial Sequence: Synthetic peptide
  MOD_RES 2: note = Aib
  MOD_RES 10: note = Bip
  MOD_RES 17: note = Lys(C8)
  REGION 1..17: note = C-term amide
HXQGTFTSDXSKYLDRK

SEQ ID NO: 387 - protein, 17 aa, synthetic construct
  REGION 1..17: note = Description of Artificial Sequence: Synthetic peptide
  MOD_RES 2: note = Aib
  MOD_RES 10: note = Bip
  MOD_RES 17: note = Lys(C12)
  REGION 1..17: note = C-term amide
HXQGTFTSDXSKYLDRK

SEQ ID NO: 388 - protein, 17 aa, synthetic construct
  REGION 1..17: note = Description of Artificial Sequence: Synthetic peptide
  MOD_RES 2: note = Aib
  MOD_RES 10: note = Bip
  MOD_RES 17: note = Lys(C16)
  REGION 1..17: note = C-term amide
HXQGTFTSDXSKYLDRK

SEQ ID NO: 389 - protein, 17 aa, synthetic construct
  REGION 1..17: note = Description of Artificial Sequence: Synthetic peptide
  MOD_RES 2: note = Aib
  MOD_RES 17: note = Lys(C8)
  REGION 1..17: note = C-term amide
HXQGTFTSDYSKYLDRK

SEQ ID NO: 390 - protein, 17 aa, synthetic construct
  REGION 1..17: note = Description of Artificial Sequence: Synthetic peptide
  MOD_RES 2: note = Aib
  MOD_RES 17: note = Lys(C12)
  REGION 1..17: note = C-term amide
HXQGTFTSDYSKYLDRK

SEQ ID NO: 391 - protein, 17 aa, synthetic construct
  REGION 1..17: note = Description of Artificial Sequence: Synthetic peptide
  MOD_RES 2: note = Aib
  MOD_RES 17: note = Lys(C16)
  REGION 1..17: note = C-term amide
HXQGTFTSDYSKYLDRK

SEQ ID NO: 392 - protein, 17 aa, synthetic construct
  REGION 1..17: note = Description of Artificial Sequence: Synthetic peptide
  MOD_RES 2: note = Aib
  MOD_RES 16: note = hArg
  MOD_RES 17: note = Lys(C12)
  REGION 1..17: note = C-term amide
HXQGTFTSDYSKYLDRK

SEQ ID NO: 393 - protein, 17 aa, synthetic construct
  REGION 1..17: note = Description of Artificial Sequence: Synthetic peptide
  MOD_RES 2: note = Aib
  MOD_RES 10: note = Bip
  MOD_RES 17: note = Lys(C12)
  REGION 1..17: note = C-term amide
HXQGTFTSDXSKYLESK

SEQ ID NO: 394 - protein, 17 aa, synthetic construct
  REGION 1..17: note = Description of Artificial Sequence: Synthetic peptide
  MOD_RES 2: note = Aib
  MOD_RES 6: note = Me-Phe
  MOD_RES 10: note = Bip
  MOD_RES 17: note = Lys(C12)
  REGION 1..17: note = C-term amide
HXQGTFTSDXSKYLESK

SEQ ID NO: 395 - protein, 17 aa, synthetic construct
  REGION 1..17: note = Description of Artificial Sequence: Synthetic peptide
  MOD_RES 2: note = Aib
  MOD_RES 6: note = Me-Phe
  MOD_RES 10: note = Bip
  MOD_RES 12: note = Aib
  MOD_RES 17: note = Lys(C12)
  REGION 1..17: note = C-term amide
HXQGTFTSDXSXYLESK

SEQ ID NO: 396 - protein, 17 aa, synthetic construct
  REGION 1..17: note = Description of Artificial Sequence: Synthetic peptide
  MOD_RES 2: note = Aib
  MOD_RES 6: note = Me-Phe
  MOD_RES 10: note = Bip
  MOD_RES 16: note = Aib
  MOD_RES 17: note = Lys(C12)
  REGION 1..17: note = C-term amide
HXQGTFTSDXSKYLEXK

SEQ ID NO: 397 - protein, 17 aa, synthetic construct
  REGION 1..17: note = Description of Artificial Sequence: Synthetic peptide
  MOD_RES 2: note = Aib
  MOD_RES 6: note = Me-Phe
  MOD_RES 16: note = Aib
  MOD_RES 17: note = Lys(C12)
  REGION 1..17: note = C-term amide
HXQGTFTSDYSKYLDXK

SEQ ID NO: 398 - protein, 17 aa, synthetic construct
  REGION 1..17: note = Description of Artificial Sequence: Synthetic peptide
  MOD_RES 2: note = Aib
  MOD_RES 6: note = Me-Phe
  MOD_RES 11: note = Aib
  MOD_RES 16: note = Aib
  MOD_RES 17: note = Lys(C12)
  REGION 1..17: note = C-term amide
HXQGTFTSDYXKYLDXK

SEQ ID NO: 399 - protein, 12 aa, synthetic construct
  REGION 1..12: note = Description of Artificial Sequence: Synthetic peptide
  MOD_RES 2: note = Aib
  MOD_RES 6: note = Me-Phe
  MOD_RES 11: note = Aib
  MOD_RES 12: note = Lys(C12)
  REGION 1..12: note = C-term amide
HXQGTFTSDYXK

SEQ ID NO: 400 - protein, 12 aa, synthetic construct
  REGION 1..12: note = Description of Artificial Sequence: Synthetic peptide
  MOD_RES 2: note = Aib
  MOD_RES 6: note = Me-Phe
  MOD_RES 10: note = Nal(2)
  MOD_RES 11: note = Aib
  MOD_RES 12: note = Lys(C12)
  REGION 1..12: note = C-term amide
HXQGTFTSDAXK

SEQ ID NO: 401 - protein, 18 aa, synthetic construct
  REGION 1..18: note = Description of Artificial Sequence: Synthetic peptide
  MOD_RES 2: note = Aib
  MOD_RES 6: note = Me-Phe
  MOD_RES 16: note = Aib
  MOD_RES 17: note = Lys(C12)
  MOD_RES 18: note = Aib
  REGION 1..18: note = C-term amide
HXQGTFTSDYSKYLDXKX

SEQ ID NO: 402 - protein, 18 aa, synthetic construct
  REGION 1..18: note = Description of Artificial Sequence: Synthetic peptide
  MOD_RES 2: note = Aib
  MOD_RES 6: note = Me-Phe
  MOD_RES 10: note = Nal(2)
  MOD_RES 16: note = Aib
  MOD_RES 17: note = Lys(C12)
  MOD_RES 18: note = Aib
  REGION 1..18: note = C-term amide
HXQGTFTSDASKYLDXKX

SEQ ID NO: 403 - protein, 17 aa, synthetic construct
  REGION 1..17: note = Description of Artificial Sequence: Synthetic peptide
  MOD_RES 2: note = Aib
  MOD_RES 6: note = Me-Phe
  MOD_RES 11: note = Aib
  MOD_RES 16: note = Aib
  MOD_RES 17: note = Lys(C12)
  REGION 1..17: note = C-term amide
HXQGTFTSDYXKYLDXK

SEQ ID NO: 404 - protein, 18 aa, synthetic construct
  REGION 1..18: note = Description of Artificial Sequence: Synthetic peptide
  MOD_RES 2: note = Aib
  MOD_RES 6: note = Me-Phe
  MOD_RES 11: note = Aib
  MOD_RES 16: note = Aib
  MOD_RES 17: note = Lys(C12)
  MOD_RES 18: note = Aib
  REGION 1..18: note = C-term amide
HXQGTFTSDYXKYLDXKX

SEQ ID NO: 405 - protein, 18 aa, synthetic construct
  REGION 1..18: note = Description of Artificial Sequence: Synthetic peptide
  MOD_RES 2: note = Aib
  MOD_RES 6: note = Me-Phe
  MOD_RES 16: note = Aib
  MOD_RES 17: note = Lys(C12)
  MOD_RES 18: note = Aib
  REGION 1..18: note = C-term amide
HXQGTFTSDYSKYLDXKX

SEQ ID NO: 406 - protein, 19 aa, synthetic construct
  REGION 1..19: note = Description of Artificial Sequence: Synthetic peptide
  MOD_RES 2: note = Aib
  MOD_RES 6: note = Me-Phe
  MOD_RES 17: note = Aib
  MOD_RES 18: note = Lys(C12)
  MOD_RES 19: note = Aib
  REGION 1..19: note = C-term amide
HXQGTFTSDYSKYLDRXKX

SEQ ID NO: 407 - protein, 19 aa, synthetic construct
  REGION 1..19: note = Description of Artificial Sequence: Synthetic peptide
  MOD_RES 2: note = Aib
  MOD_RES 6: note = Me-Phe
  MOD_RES 11: note = Aib
  MOD_RES 17: note = Aib
  MOD_RES 18: note = Lys(C12)
  MOD_RES 19: note = Aib
  REGION 1..19: note = C-term amide
HXQGTFTSDYXKYLDRXKX

SEQ ID NO: 408 - protein, 19 aa, synthetic construct
  REGION 1..19: note = Description of Artificial Sequence: Synthetic peptide
  MOD_RES 2: note = Aib
  MOD_RES 6: note = Me-Phe
  MOD_RES 11: note = Aib
  MOD_RES 17: note = Aib
  MOD_RES 18: note = Lys(C12)
  MOD_RES 19: note = Ac5c
  REGION 1..19: note = C-term amide
HXQGTFTSDYXKYLDRXKX

SEQ ID NO: 409 - protein, 18 aa, synthetic construct
  REGION 1..18: note = Description of Artificial Sequence: Synthetic peptide
  MOD_RES 2: note = Aib
  MOD_RES 6: note = Me-Phe
  MOD_RES 10: note = Nal(2)
  MOD_RES 11: note = Aib
  MOD_RES 17: note = Aib
  MOD_RES 18: note = Lys(C12)
  REGION 1..18: note = C-term amide
HXQGTFTSDAXKYLERXK

SEQ ID NO: 410 - protein, 19 aa, synthetic construct
  REGION 1..19: note = Description of Artificial Sequence: Synthetic peptide
  MOD_RES 2: note = Aib
  MOD_RES 16: note = hArg
  MOD_RES 17: note = Aib
  MOD_RES 18: note = Lys(C8)
  MOD_RES 19: note = Aib
  REGION 1..19: note = C-term amide
HXQGTFTSDYSKYLDRXKX

SEQ ID NO: 411 - protein, 19 aa, synthetic construct
  REGION 1..19: note = Description of Artificial Sequence: Synthetic peptide
  MOD_RES 2: note = Aib
  MOD_RES 16: note = hArg
  MOD_RES 17: note = Aib
  MOD_RES 18: note = Lys(C12)
  MOD_RES 19: note = Aib
  REGION 1..19: note = C-term amide
HXQGTFTSDYSKYLDRXKX

SEQ ID NO: 412 - protein, 19 aa, synthetic construct
  REGION 1..19: note = Description of Artificial Sequence: Synthetic peptide
  MOD_RES 2: note = Aib
  MOD_RES 16: note = hArg
  MOD_RES 17: note = Aib
  MOD_RES 18: note = Lys(C16)
  MOD_RES 19: note = Aib
  REGION 1..19: note = C-term amide
HXQGTFTSDYSKYLDRXKX

SEQ ID NO: 413 - protein, 14 aa, synthetic construct
  REGION 1..14: note = Description of Artificial Sequence: Synthetic peptide
  MOD_RES 2: note = Aib
  MOD_RES 6: note = Me-Phe
  MOD_RES 11: note = Aib
  MOD_RES 14: note = Lys(C12)
  REGION 1..14: note = C-term amide
HXQGTFTSDYXKYK

SEQ ID NO: 414 - protein, 14 aa, synthetic construct
  REGION 1..14: note = Description of Artificial Sequence: Synthetic peptide
  MOD_RES 2: note = Aib
  MOD_RES 6: note = Me-Phe
  MOD_RES 11: note = Aib
  MOD_RES 14: note = Lys(C12)
  REGION 1..14: note = C-term NHEt
HXQGTFTSDYXKYK

SEQ ID NO: 415 - protein, 15 aa, synthetic construct
  REGION 1..15: note = Description of Artificial Sequence: Synthetic peptide
  MOD_RES 2: note = Aib
  MOD_RES 6: note = Me-Phe
  MOD_RES 11: note = Aib
  MOD_RES 14: note = Lys(C12)
  MOD_RES 15: note = Aib
  REGION 1..15: note = C-term amide
HXQGTFTSDYXKYKX

SEQ ID NO: 416 - protein, 15 aa, synthetic construct
  REGION 1..15: note = Description of Artificial Sequence: Synthetic peptide
  MOD_RES 2: note = Aib
  MOD_RES 6: note = Me-Phe
  MOD_RES 11: note = Aib
  MOD_RES 14: note = Lys(C12)
  MOD_RES 15: note = Aib
  REGION 1..15: note = C-term NHEt
HXQGTFTSDYXKYKX

SEQ ID NO: 417 - protein, 15 aa, synthetic construct
  REGION 1..15: note = Description of Artificial Sequence: Synthetic peptide
  MOD_RES 2: note = Aib
  MOD_RES 6: note = Me-Phe
  MOD_RES 11: note = Aib
  MOD_RES 14: note = Lys(C12)
  MOD_RES 15: note = Ac5c
  REGION 1..15: note = C-term amide
HXQGTFTSDYXKYKX

SEQ ID NO: 418 - protein, 17 aa, synthetic construct
  REGION 1..17: note = Description of Artificial Sequence: Synthetic peptide
  MOD_RES 2: note = Aib
  MOD_RES 6: note = Me-Phe
  MOD_RES 16: note = Aib
  MOD_RES 17: note = Lys(C8)
  REGION 1..17: note = C-term amide
HXQGTFTSDYSKYLDXK

SEQ ID NO: 419 - protein, 17 aa, synthetic construct
  REGION 1..17: note = Description of Artificial Sequence: Synthetic peptide
  MOD_RES 2: note = Aib
  MOD_RES 6: note = Me-Phe
  MOD_RES 16: note = Aib
  MOD_RES 17: note = Lys(C16)
  REGION 1..17: note = C-term amide
HXQGTFTSDYSKYLDXK

SEQ ID NO: 420 - protein, 17 aa, synthetic construct
  REGION 1..17: note = Description of Artificial Sequence: Synthetic peptide
  MOD_RES 2: note = Aib
  MOD_RES 16: note = Aib
  MOD_RES 17: note = Lys(C8)
  REGION 1..17: note = C-term amide
HXQGTFTSDYSKYLDXK

SEQ ID NO: 421 - protein, 17 aa, synthetic construct
  REGION 1..17: note = Description of Artificial Sequence: Synthetic peptide
  MOD_RES 2: note = Aib
  MOD_RES 16: note = Aib
  MOD_RES 17: note = Lys(C12)
  REGION 1..17: note = C-term amide
HXQGTFTSDYSKYLDXK

SEQ ID NO: 422 - protein, 17 aa, synthetic construct
  REGION 1..17: note = Description of Artificial Sequence: Synthetic peptide
  MOD_RES 2: note = Aib
  MOD_RES 16: note = Aib
  MOD_RES 17: note = Lys(C16)
  REGION 1..17: note = C-term amide
HXQGTFTSDYSKYLDXK

SEQ ID NO: 423 - protein, 19 aa, synthetic construct
  REGION 1..19: note = Description of Artificial Sequence: Synthetic peptide
  MOD_RES 2: note = Aib
  MOD_RES 6: note = Me-Phe
  MOD_RES 17: note = Aib
  MOD_RES 18: note = Lys(C8)
  MOD_RES 19: note = Aib
  REGION 1..19: note = C-term amide
HXQGTFTSDYSKYLDSXKX

SEQ ID NO: 424 - protein, 19 aa, synthetic construct
  REGION 1..19: note = Description of Artificial Sequence: Synthetic peptide
  MOD_RES 2: note = Aib
  MOD_RES 6: note = Me-Phe
  MOD_RES 17: note = Aib
  MOD_RES 18: note = Lys(C12)
  MOD_RES 19: note = Aib
  REGION 1..19: note = C-term amide
HXQGTFTSDYSKYLDSXKX

SEQ ID NO: 425 - protein, 19 aa, synthetic construct
  REGION 1..19: note = Description of Artificial Sequence: Synthetic peptide
  MOD_RES 2: note = Aib
  MOD_RES 6: note = Me-Phe
  MOD_RES 17: note = Aib
  MOD_RES 18: note = Lys(C16)
  MOD_RES 19: note = Aib
  REGION 1..19: note = C-term amide
HXQGTFTSDYSKYLDSXKX

SEQ ID NO: 426 - protein, 19 aa, synthetic construct
  REGION 1..19: note = Description of Artificial Sequence: Synthetic peptide
  MOD_RES 2: note = Aib
  MOD_RES 6: note = Me-Phe
  MOD_RES 17: note = Aib
  MOD_RES 18: note = Lys(C8)
  MOD_RES 19: note = Ac5c
  REGION 1..19: note = C-term amide
HXQGTFTSDYSKYLDSXKX

SEQ ID NO: 427 - protein, 19 aa, synthetic construct
  REGION 1..19: note = Description of Artificial Sequence: Synthetic peptide
  MOD_RES 2: note = Aib
  MOD_RES 6: note = Me-Phe
  MOD_RES 17: note = Aib
  MOD_RES 18: note = Lys(C12)
  MOD_RES 19: note = Ac5c
  REGION 1..19: note = C-term amide
HXQGTFTSDYSKYLDSXKX

SEQ ID NO: 428 - protein, 19 aa, synthetic construct
  REGION 1..19: note = Description of Artificial Sequence: Synthetic peptide
  MOD_RES 2: note = Aib
  MOD_RES 6: note = Me-Phe
  MOD_RES 17: note = Aib
  MOD_RES 18: note = Lys(C16)
  MOD_RES 19: note = Ac5c
  REGION 1..19: note = C-term amide
HXQGTFTSDYSKYLDSXKX

SEQ ID NO: 429 - protein, 19 aa, synthetic construct
  REGION 1..19: note = Description of Artificial Sequence: Synthetic peptide
  MOD_RES 2: note = Aib
  MOD_RES 17: note = Aib
  MOD_RES 18: note = Lys(C8)
  MOD_RES 19: note = Ac5c
  REGION 1..19: note = C-term amide
HXQGTFTSDYSKYLDSXKX

SEQ ID NO: 430 - protein, 19 aa, synthetic construct
  REGION 1..19: note = Description of Artificial Sequence: Synthetic peptide
  MOD_RES 2: note = Aib
  MOD_RES 17: note = Aib
  MOD_RES 18: note = Lys(C12)
  MOD_RES 19: note = Ac5c
  REGION 1..19: note = C-term amide
HXQGTFTSDYSKYLDSXKX

SEQ ID NO: 431 - protein, 19 aa, synthetic construct
  REGION 1..19: note = Description of Artificial Sequence: Synthetic peptide
  MOD_RES 2: note = Aib
  MOD_RES 17: note = Aib
  MOD_RES 18: note = Lys(C16)
  MOD_RES 19: note = Ac5c
  REGION 1..19: note = C-term amide
HXQGTFTSDYSKYLDSXKX

SEQ ID NO: 432 - protein, 20 aa, synthetic construct
  REGION 1..20: note = Description of Artificial Sequence: Synthetic peptide
  MOD_RES 2: note = Aib
  MOD_RES 6: note = Me-Phe
  MOD_RES 18: note = Aib
  MOD_RES 19: note = Lys(C8)
  MOD_RES 20: note = Aib
  REGION 1..20: note = C-term amide
HXQGTFTSDYSKYLDSRXKX

SEQ ID NO: 433 - protein, 20 aa, synthetic construct
  REGION 1..20: note = Description of Artificial Sequence: Synthetic peptide
  MOD_RES 2: note = Aib
  MOD_RES 6: note = Me-Phe
  MOD_RES 18: note = Aib
  MOD_RES 19: note = Lys(C12)
  MOD_RES 20: note = Aib
  REGION 1..20: note = C-term amide
HXQGTFTSDYSKYLDSRXKX

SEQ ID NO: 434 - protein, 20 aa, synthetic construct
  REGION 1..20: note = Description of Artificial Sequence: Synthetic peptide
  MOD_RES 2: note = Aib
  MOD_RES 6: note = Me-Phe
  MOD_RES 18: note = Aib
  MOD_RES 19: note = Lys(C16)
  MOD_RES 20: note = Aib
  REGION 1..20: note = C-term amide
HXQGTFTSDYSKYLDSRXKX

SEQ ID NO: 435 - protein, 20 aa, synthetic construct
  REGION 1..20: note = Description of Artificial Sequence: Synthetic peptide
  MOD_RES 2: note = Aib
  MOD_RES 6: note = Me-Phe
  MOD_RES 18: note = Aib
  MOD_RES 19: note = Lys(C8)
  MOD_RES 20: note = Ac5c
  REGION 1..20: note = C-term amide
HXQGTFTSDYSKYLDSRXKX

SEQ ID NO: 436 - protein, 20 aa, synthetic construct
  REGION 1..20: note = Description of Artificial Sequence: Synthetic peptide
  MOD_RES 2: note = Aib
  MOD_RES 6: note = Me-Phe
  MOD_RES 18: note = Aib
  MOD_RES 19: note = Lys(C12)
  MOD_RES 20: note = Ac5c
  REGION 1..20: note = C-term amide
HXQGTFTSDYSKYLDSRXKX

SEQ ID NO: 437 - protein, 20 aa, synthetic construct
  REGION 1..20: note = Description of Artificial Sequence: Synthetic peptide
  MOD_RES 2: note = Aib
  MOD_RES 6: note = Me-Phe
  MOD_RES 18: note = Aib
  MOD_RES 19: note = Lys(C16)
  MOD_RES 20: note = Ac5c
  REGION 1..20: note = C-term amide
HXQGTFTSDYSKYLDSRXKX

SEQ ID NO: 438 - protein, 20 aa, synthetic construct
  REGION 1..20: note = Description of Artificial Sequence: Synthetic peptide
  MOD_RES 2: note = Aib
  MOD_RES 18: note = Aib
  MOD_RES 19: note = Lys(C8)
  MOD_RES 20: note = Aib
  REGION 1..20: note = C-term amide
HXQGTFTSDYSKYLDSRXKX

SEQ ID NO: 439 - protein, 20 aa, synthetic construct
  REGION 1..20: note = Description of Artificial Sequence: Synthetic peptide
  MOD_RES 2: note = Aib
  MOD_RES 18: note = Aib
  MOD_RES 19: note = Lys(C12)
  MOD_RES 20: note = Aib
  REGION 1..20: note = C-term amide
HXQGTFTSDYSKYLDSRXKX

SEQ ID NO: 440 - protein, 20 aa, synthetic construct
  REGION 1..20: note = Description of Artificial Sequence: Synthetic peptide
  MOD_RES 2: note = Aib
  MOD_RES 18: note = Aib
  MOD_RES 19: note = Lys(C16)
  MOD_RES 20: note = Aib
  REGION 1..20: note = C-term amide
HXQGTFTSDYSKYLDSRXKX

SEQ ID NO: 441 - protein, 23 aa, synthetic construct
  REGION 1..23: note = Description of Artificial Sequence: Synthetic peptide
  MOD_RES 2: note = Aib
  MOD_RES 6: note = Me-Phe
  MOD_RES 18: note = Aib
  MOD_RES 21: note = Lys(C8)
  MOD_RES 23: note = Aib
  REGION 1..23: note = C-term amide
HXQGTFTSDYSKYLDSRXAQKFX

SEQ ID NO: 442 - protein, 23 aa, synthetic construct
  REGION 1..23: note = Description of Artificial Sequence: Synthetic peptide
  MOD_RES 2: note = Aib
  MOD_RES 6: note = Me-Phe
  MOD_RES 18: note = Aib
  MOD_RES 21: note = Lys(C12)
  MOD_RES 23: note = Aib
  REGION 1..23: note = C-term amide
HXQGTFTSDYSKYLDSRXAQKFX

SEQ ID NO: 443 - protein, 23 aa, synthetic construct
  REGION 1..23: note = Description of Artificial Sequence: Synthetic peptide
  MOD_RES 2: note = Aib
  MOD_RES 6: note = Me-Phe
  MOD_RES 18: note = Aib
  MOD_RES 21: note = Lys(C16)
  MOD_RES 23: note = Aib
  REGION 1..23: note = C-term amide
HXQGTFTSDYSKYLDSRXAQKFX

SEQ ID NO: 444 - protein, 23 aa, synthetic construct
  REGION 1..23: note = Description of Artificial Sequence: Synthetic peptide
  MOD_RES 2: note = Aib
  MOD_RES 6: note = Me-Phe
  MOD_RES 18: note = Aib
  MOD_RES 21: note = Lys(C8)
  MOD_RES 23: note = Aib
  REGION 1..23: note = C-term amide
HXQGTFTSDYSKYLDSRXAQKFX

SEQ ID NO: 445 - protein, 23 aa, synthetic construct
  REGION 1..23: note = Description of Artificial Sequence: Synthetic peptide
  MOD_RES 2: note = Aib
  MOD_RES 6: note = Me-Phe
  MOD_RES 18: note = Aib
  MOD_RES 21: note = Lys(C12)
  MOD_RES 23: note = Aib
  REGION 1..23: note = C-term amide
HXQGTFTSDYSKYLDSRXAQKFX

SEQ ID NO: 446 - protein, 23 aa, synthetic construct
  REGION 1..23: note = Description of Artificial Sequence: Synthetic peptide
  MOD_RES 2: note = Aib
  MOD_RES 6: note = Me-Phe
  MOD_RES 18: note = Aib
  MOD_RES 21: note = Lys(C16)
  MOD_RES 23: note = Aib
  REGION 1..23: note = C-term amide
HXQGTFTSDYSKYLDSRXAQKFX

SEQ ID NO: 447 - protein, 23 aa, synthetic construct
  REGION 1..23: note = Description of Artificial Sequence: Synthetic peptide
  MOD_RES 2: note = Aib
  MOD_RES 6: note = Me-Phe
  MOD_RES 18: note = Aib
  MOD_RES 21: note = Lys(C8)
  MOD_RES 23: note = Ac5c
  REGION 1..23: note = C-term amide
HXQGTFTSDYSKYLDSRXAQKFX

SEQ ID NO: 448 - protein, 23 aa, synthetic construct
  REGION 1..23: note = Description of Artificial Sequence: Synthetic peptide
  MOD_RES 2: note = Aib
  MOD_RES 6: note = Me-Phe
  MOD_RES 18: note = Aib
  MOD_RES 21: note = Lys(C12)
  MOD_RES 23: note = Ac5c
  REGION 1..23: note = C-term amide
HXQGTFTSDYSKYLDSRXAQKFX

SEQ ID NO: 449 - protein, 23 aa, synthetic construct
  REGION 1..23: note = Description of Artificial Sequence: Synthetic peptide
  MOD_RES 2: note = Aib
  MOD_RES 6: note = Me-Phe
  MOD_RES 18: note = Aib
  MOD_RES 21: note = Lys(C16)
  MOD_RES 23: note = Ac5c
  REGION 1..23: note = C-term amide
HXQGTFTSDYSKYLDSRXAQKFX

SEQ ID NO: 450 - protein, 23 aa, synthetic construct
  REGION 1..23: note = Description of Artificial Sequence: Synthetic peptide
  MOD_RES 2: note = Aib
  MOD_RES 6: note = Me-Phe
  REGION 12..16: note = misc_feature - Cyclic
  REGION 12..16: note = misc_feature - Cyclic
  MOD_RES 12: note = Glu is cyclized through side chain to form a lactam linkage
  MOD_RES 16: note = Lys is cyclized through side chain to form a lactam linkage
  MOD_RES 18: note = Aib
  MOD_RES 21: note = Lys(C8)
  MOD_RES 23: note = Aib
  REGION 1..23: note = C-term amide
HXQGTFTSDYSEYLDKRXAQKFX

SEQ ID NO: 451 - protein, 23 aa, synthetic construct
  REGION 1..23: note = Description of Artificial Sequence: Synthetic peptide
  MOD_RES 2: note = Aib
  MOD_RES 6: note = Me-Phe
  REGION 12..16: note = misc_feature - Cyclic
  MOD_RES 12: note = Glu is cyclized through side chain to form a lactam linkage
  MOD_RES 16: note = Lys is cyclized through side chain to form a lactam linkage
  MOD_RES 18: note = Aib
  MOD_RES 21: note = Lys(C12)
  MOD_RES 23: note = Aib
  REGION 1..23: note = C-term amide
HXQGTFTSDYSEYLDKRXAQKFX

SEQ ID NO: 452 - protein, 23 aa, synthetic construct
  REGION 1..23: note = Description of Artificial Sequence: Synthetic peptide
  MOD_RES 2: note = Aib
  MOD_RES 6: note = Me-Phe
  REGION 12..16: note = misc_feature - Cyclic
  MOD_RES 12: note = Glu is cyclized through side chain to form a lactam linkage
  MOD_RES 16: note = Lys is cyclized through side chain to form a lactam linkage
  MOD_RES 18: note = Aib
  MOD_RES 21: note = Lys(C16)
  MOD_RES 23: note = Aib
  REGION 1..23: note = C-term amide
HXQGTFTSDYSEYLDKRXAQKFX

SEQ ID NO: 453 - protein, 23 aa, synthetic construct
  REGION 1..23: note = Description of Artificial Sequence: Synthetic peptide
  MOD_RES 2: note = Aib
  MOD_RES 6: note = Me-Phe
  REGION 12..16: note = misc_feature - Cyclic
  MOD_RES 12: note = Glu is cyclized through side chain to form a lactam linkage
  MOD_RES 16: note = Lys is cyclized through side chain to form a lactam linkage
  MOD_RES 18: note = Aib
  MOD_RES 21: note = Lys(C8)
  MOD_RES 23: note = Ac5c
  REGION 1..23: note = C-term amide
HXQGTFTSDYSEYLDKRXAQKFX

SEQ ID NO: 454 - protein, 23 aa, synthetic construct
  REGION 1..23: note = Description of Artificial Sequence: Synthetic peptide
  MOD_RES 2: note = Aib
  MOD_RES 6: note = Me-Phe
  REGION 12..16: note = misc_feature - Cyclic
  MOD_RES 12: note = Glu is cyclized through side chain to form a lactam linkage
  MOD_RES 16: note = Lys is cyclized through side chain to form a lactam linkage
  MOD_RES 18: note = Aib
  MOD_RES 21: note = Lys(C12)
  MOD_RES 23: note = Ac5c
  REGION 1..23: note = C-term amide
HXQGTFTSDYSEYLDKRXAQKFX

SEQ ID NO: 455 - protein, 23 aa, synthetic construct
  REGION 1..23: note = Description of Artificial Sequence: Synthetic peptide
  MOD_RES 2: note = Aib
  MOD_RES 6: note = Me-Phe
  REGION 12..16: note = misc_feature - Cyclic
  MOD_RES 12: note = Glu is cyclized through side chain to form a lactam linkage
  MOD_RES 16: note = Lys is cyclized through side chain to form a lactam linkage
  MOD_RES 18: note = Aib
  MOD_RES 21: note = Lys(C16)
  MOD_RES 23: note = Ac5c
  REGION 1..23: note = C-term amide
HXQGTFTSDYSEYLDKRXAQKFX

SEQ ID NO: 456 - protein, 23 aa, synthetic construct
  REGION 1..23: note = Description of Artificial Sequence: Synthetic peptide
  MOD_RES 2: note = Aib
  REGION 12..16: note = misc_feature - Cyclic
  MOD_RES 12: note = Glu is cyclized through side chain to form a lactam linkage
  MOD_RES 16: note = Lys is cyclized through side chain to form a lactam linkage
  MOD_RES 18: note = Aib
  MOD_RES 21: note = Lys(C8)
  MOD_RES 23: note = Ac5c
  REGION 1..23: note = C-term amide
HXQGTFTSDYSEYLDKRXAQKFX

SEQ ID NO: 457 - protein, 23 aa, synthetic construct
  REGION 1..23: note = Description of Artificial Sequence: Synthetic peptide
  MOD_RES 2: note = Aib
  REGION 12..16: note = misc_feature - Cyclic
  MOD_RES 12: note = Glu is cyclized through side chain to form a lactam linkage
  MOD_RES 16: note = Lys is cyclized through side chain to form a lactam linkage
  MOD_RES 18: note = Aib
  MOD_RES 21: note = Lys(C12)
  MOD_RES 23: note = Ac5c
  REGION 1..23: note = C-term amide
HXQGTFTSDYSEYLDKRXAQKFX

SEQ ID NO: 458 - protein, 23 aa, synthetic construct
  REGION 1..23: note = Description of Artificial Sequence: Synthetic peptide
  MOD_RES 2: note = Aib
  MOD_RES 12: note = Glu is cyclized through side chain to form a lactam linkage
  MOD_RES 16: note = Lys is cyclized through side chain to form a lactam linkage
  MOD_RES 18: note = Aib
  MOD_RES 21: note = Lys(C16)
  MOD_RES 23: note = Ac5c
  REGION 1..23: note = C-term amide
HXQGTFTSDYSEYLDKRXAQKFX

SEQ ID NO: 459 - protein, 23 aa, synthetic construct
  REGION 1..23: note = Description of Artificial Sequence: Synthetic peptide
  MOD_RES 2: note = Aib
  REGION 12..16: note = misc_feature - Cyclic
  MOD_RES 12: note = Glu is cyclized through side chain to form a lactam linkage
  MOD_RES 16: note = Lys is cyclized through side chain to form a lactam linkage
  MOD_RES 18: note = Aib
  MOD_RES 21: note = Lys(C8)
  MOD_RES 23: note = Aib
  REGION 1..23: note = C-term amide
HXQGTFTSDYSEYLDKRXAQKFX

SEQ ID NO: 460 - protein, 23 aa, synthetic construct
  REGION 1..23: note = Description of Artificial Sequence: Synthetic peptide
  MOD_RES 2: note = Aib
  REGION 12..16: note = misc_feature - Cyclic
  MOD_RES 12: note = Glu is cyclized through side chain to form a lactam linkage
  MOD_RES 16: note = Lys is cyclized through side chain to form a lactam linkage
  MOD_RES 18: note = Aib
  MOD_RES 21: note = Lys(C12)
  MOD_RES 23: note = Aib
  REGION 1..23: note = C-term amide
HXQGTFTSDYSEYLDKRXAQKFX

SEQ ID NO: 461 - protein, 23 aa, synthetic construct
  REGION 1..23: note = Description of Artificial Sequence: Synthetic peptide
  MOD_RES 2: note = Aib
  REGION 12..16: note = misc_feature - Cyclic
  MOD_RES 12: note = Glu is cyclized through side chain to form a lactam linkage
  MOD_RES 16: note = Lys is cyclized through side chain to form a lactam linkage
  MOD_RES 18: note = Aib
  MOD_RES 21: note = Lys(C16)
  MOD_RES 23: note = Aib
  REGION 1..23: note = C-term amide
HXQGTFTSDYSEYLDKRXAQKFX

SEQ ID NO: 462 - protein, 23 aa, synthetic construct
  REGION 1..23: note = Description of Artificial Sequence: Synthetic peptide
  MOD_RES 2: note = Aib
  MOD_RES 6: note = Me-Phe
  REGION 16..20: note = misc_feature - Cyclic
  MOD_RES 16: note = Glu is cyclized through side chain to form a lactam linkage
  MOD_RES 18: note = Aib
  MOD_RES 20: note = Lys is cyclized through side chain to form a lactam linkage
  MOD_RES 21: note = Lys(C8)
  MOD_RES 23: note = Aib
  REGION 1..23: note = C-term amide
HXQGTFTSDYSKYLDERXAKKFX

SEQ ID NO: 463 - protein, 23 aa, synthetic construct
  REGION 1..23: note = Description of Artificial Sequence: Synthetic peptide
  MOD_RES 2: note = Aib
  MOD_RES 6: note = Me-Phe
  REGION 16..20: note = misc_feature - Cyclic
  MOD_RES 16: note = Glu is cyclized through side chain to form a lactam linkage
  MOD_RES 18: note = Aib
  MOD_RES 20: note = Lys is cyclized through side chain to form a lactam linkage
  MOD_RES 21: note = Lys(C12)
  MOD_RES 23: note = Aib
  REGION 1..23: note = C-term amide
HXQGTFTSDYSKYLDERXAKKFX

SEQ ID NO: 464 - protein, 23 aa, synthetic construct
  REGION 1..23: note = Description of Artificial Sequence: Synthetic peptide
  MOD_RES 2: note = Aib
  MOD_RES 6: note = Me-Phe
  MOD_RES 16: note = Glu is cyclized through side chain to form a lactam linkage
  MOD_RES 18: note = Aib
  MOD_RES 20: note = Lys is cyclized through side chain to form a lactam linkage
  MOD_RES 21: note = Lys(C16)
  MOD_RES 23: note = Aib
  REGION 1..23: note = C-term amide
HXQGTFTSDYSKYLDERXAKKFX

SEQ ID NO: 465 - protein, 23 aa, synthetic construct
  REGION 1..23: note = Description of Artificial Sequence: Synthetic peptide
  MOD_RES 2: note = Aib
  MOD_RES 6: note = Me-Phe
  REGION 16..20: note = misc_feature - Cyclic
  MOD_RES 16: note = Glu is cyclized through side chain to form a lactam linkage
  MOD_RES 18: note = Aib
  MOD_RES 20: note = Lys is cyclized through side chain to form a lactam linkage
  MOD_RES 21: note = Lys(C8)
  MOD_RES 23: note = Ac5c
  REGION 1..23: note = C-term amide
HXQGTFTSDYSKYLDERXAKKFX

SEQ ID NO: 466 - protein, 23 aa, synthetic construct
  REGION 1..23: note = Description of Artificial Sequence: Synthetic peptide
  MOD_RES 2: note = Aib
  MOD_RES 6: note = Me-Phe
  MOD_RES 16: note = Lys is cyclized through side chain to form a lactam linkage
  MOD_RES 18: note = Aib
  MOD_RES 20: note = Lys is cyclized through side chain to form a lactam linkage
  MOD_RES 21: note = Lys(C12)
  MOD_RES 23: note = Ac5c
  REGION 1..23: note = C-term amide
HXQGTFTSDYSKYLDKRXAKKFX

SEQ ID NO: 467 - protein, 23 aa, synthetic construct
  REGION 1..23: note = Description of Artificial Sequence: Synthetic peptide
  MOD_RES 2: note = Aib
  MOD_RES 6: note = Me-Phe
  MOD_RES 16: note = Lys is cyclized through side chain to form a lactam linkage
  MOD_RES 18: note = Aib
  MOD_RES 20: note = Lys is cyclized through side chain to form a lactam linkage
  MOD_RES 21: note = Lys(C16)
  MOD_RES 23: note = Ac5c
  REGION 1..23: note = C-term amide
HXQGTFTSDYSKYLDKRXAKKFX

SEQ ID NO: 468 - protein, 23 aa, synthetic construct
  REGION 1..23: note = Description of Artificial Sequence: Synthetic peptide
  MOD_RES 2: note = Aib
  REGION 16..20: note = misc_feature - Cyclic
  MOD_RES 16: note = Glu is cyclized through side chain to form a lactam linkage
  MOD_RES 18: note = Aib
  MOD_RES 20: note = Lys is cyclized through side chain to form a lactam linkage
  MOD_RES 21: note = Lys(C8)
  MOD_RES 23: note = Aib
  REGION 1..23: note = C-term amide
HXQGTFTSDYSKYLDERXAKKFX

SEQ ID NO: 469 - protein, 23 aa, synthetic construct
  REGION 1..23: note = Description of Artificial Sequence: Synthetic peptide
  MOD_RES 2: note = Aib
  REGION 16..20: note = misc_feature - Cyclic
  MOD_RES 16: note = Glu is cyclized through side chain to form a lactam linkage
  MOD_RES 18: note = Aib
  MOD_RES 20: note = Lys is cyclized through side chain to form a lactam linkage
  MOD_RES 21: note = Lys(C12)
  MOD_RES 23: note = Aib
  REGION 1..23: note = C-term amide
HXQGTFTSDYSKYLDERXAKKFX

SEQ ID NO: 470 - protein, 23 aa, synthetic construct
  REGION 1..23: note = Description of Artificial Sequence: Synthetic peptide
  MOD_RES 2: note = Aib
  REGION 16..20: note = misc_feature - Cyclic
  MOD_RES 16: note = Glu is cyclized through side chain to form a lactam linkage
  MOD_RES 18: note = Aib
  MOD_RES 20: note = Lys is cyclized through side chain to form a lactam linkage
  MOD_RES 21: note = Lys(C16)
  MOD_RES 23: note = Aib
  REGION 1..23: note = C-term amide
HXQGTFTSDYSKYLDERXAKKFX

SEQ ID NO: 471 - protein, 23 aa, synthetic construct
  REGION 1..23: note = Description of Artificial Sequence: Synthetic peptide
  MOD_RES 2: note = Aib
  REGION 16..20: note = misc_feature - Cyclic
  MOD_RES 16: note = Glu is cyclized through side chain to form a lactam linkage
  MOD_RES 18: note = Aib
  MOD_RES 20: note = Lys is cyclized through side chain to form a lactam linkage
  MOD_RES 21: note = Lys(C8)
  MOD_RES 23: note = Ac5c
  REGION 1..23: note = C-term amide
HXQGTFTSDYSKYLDERXAKKFX

SEQ ID NO: 472 - protein, 23 aa, synthetic construct
  REGION 1..23: note = Description of Artificial Sequence: Synthetic peptide
  MOD_RES 2: note = Aib
  MOD_RES 16: note = Lys is cyclized through side chain to form a lactam linkage
  MOD_RES 18: note = Aib
  MOD_RES 20: note = Lys is cyclized through side chain to form a lactam linkage
  MOD_RES 21: note = Lys(C12)
  MOD_RES 23: note = Ac5c
  REGION 1..23: note = C-term amide
HXQGTFTSDYSKYLDKRXAKKFX

SEQ ID NO: 473 - protein, 23 aa, synthetic construct
  REGION 1..23: note = Description of Artificial Sequence: Synthetic peptide
  MOD_RES 2: note = Aib
  MOD_RES 16: note = Lys is cyclized through side chain to form a lactam linkage
  MOD_RES 18: note = Aib
  MOD_RES 20: note = Lys is cyclized through side chain to form a lactam linkage
  MOD_RES 21: note = Lys(C16)
  MOD_RES 23: note = Ac5c
  REGION 1..23: note = C-term amide
HXQGTFTSDYSKYLDKRXAKKFX

SEQ ID NO: 474 - protein, 23 aa, synthetic construct
  REGION 1..23: note = Description of Artificial Sequence: Synthetic peptide
  MOD_RES 2: note = Aib
  REGION 16..20: note = misc_feature - Cyclic
  MOD_RES 16: note = Glu is cyclized through side chain to form a lactam linkage
  MOD_RES 20: note = Lys is cyclized through side chain to form a lactam linkage
  MOD_RES 21: note = Lys(C12)
  MOD_RES 23: note = Aib
  REGION 1..23: note = C-term amide
HXQGTFTSDYSKYLDEQAAKKFX

SEQ ID NO: 475 - protein, 23 aa, synthetic construct
  REGION 1..23: note = Description of Artificial Sequence: Synthetic peptide
  MOD_RES 2: note = Aib
  REGION 16..20: note = misc_feature - Cyclic
  MOD_RES 16: note = Glu is cyclized through side chain to form a lactam linkage
  MOD_RES 20: note = Lys is cyclized through side chain to form a lactam linkage
  MOD_RES 21: note = Lys(C16)
  MOD_RES 23: note = Aib
  REGION 1..23: note = C-term amide
HXQGTFTSDYSKYLDEQAAKKFX

SEQ ID NO: 476 - protein, 23 aa, synthetic construct
  REGION 1..23: note = Description of Artificial Sequence: Synthetic peptide
  MOD_RES 2: note = Aib
  REGION 16..20: note = misc_feature - Cyclic
  MOD_RES 16: note = Glu is cyclized through side chain to form a lactam linkage
  MOD_RES 20: note = Lys is cyclized through side chain to form a lactam linkage
  MOD_RES 21: note = Lys(C12)
  MOD_RES 23: note = Aib
  REGION 1..23: note = C-term amide
HXQGTFTSDYSKYLDERAAKKFX

SEQ ID NO: 477 - protein, 23 aa, synthetic construct
  REGION 1..23: note = Description of Artificial Sequence: Synthetic peptide
  MOD_RES 2: note = Aib
  REGION 16..20: note = misc_feature - Cyclic
  MOD_RES 16: note = Glu is cyclized through side chain to form a lactam linkage
  MOD_RES 20: note = Lys is cyclized through side chain to form a lactam linkage
  MOD_RES 21: note = Lys(C16)
  MOD_RES 23: note = Aib
  REGION 1..23: note = C-term amide
HXQGTFTSDYSKYLDERAAKKFX

SEQ ID NO: 478 - protein, 23 aa, synthetic construct
  REGION 1..23: note = Description of Artificial Sequence: Synthetic peptide
  MOD_RES 2: note = Aib
  REGION 16..20: note = misc_feature - Cyclic
  MOD_RES 16: note = Glu is cyclized through side chain to form a lactam linkage
  MOD_RES 20: note = Lys is cyclized through side chain to form a lactam linkage
  MOD_RES 21: note = Lys(C12)
  MOD_RES 23: note = Ac5c
  REGION 1..23: note = C-term amide
HXQGTFTSDYSKYLDERAAKKFX

SEQ ID NO: 479 - protein, 23 aa, synthetic construct
  REGION 1..23: note = Description of Artificial Sequence: Synthetic peptide
  MOD_RES 2: note = Aib
  REGION 16..20: note = misc_feature - Cyclic
  MOD_RES 16: note = Glu is cyclized through side chain to form a lactam linkage
  MOD_RES 20: note = Lys is cyclized through side chain to form a lactam linkage
  MOD_RES 21: note = Lys(C16)
  MOD_RES 23: note = Ac5c
  REGION 1..23: note = C-term amide
HXQGTFTSDYSKYLDERAAKKFX

SEQ ID NO: 480 - protein, 23 aa, synthetic construct
  REGION 1..23: note = Description of Artificial Sequence: Synthetic peptide
  MOD_RES 2: note = Aib
  REGION 16..20: note = misc_feature - Cyclic
  MOD_RES 16: note = Glu is cyclized through side chain to form a lactam linkage
  MOD_RES 20: note = Lys is cyclized through side chain to form a lactam linkage
  MOD_RES 21: note = Lys(C12)
  MOD_RES 23: note = Ac5c
  REGION 1..23: note = C-term amide
HXQGTFTSDYSKYLDEQAAKKFX

SEQ ID NO: 481 - protein, 23 aa, synthetic construct
  REGION 1..23: note = Description of Artificial Sequence: Synthetic peptide
  MOD_RES 2: note = Aib
  REGION 16..20: note = misc_feature - Cyclic
  MOD_RES 16: note = Glu is cyclized through side chain to form a lactam linkage
  MOD_RES 20: note = Lys is cyclized through side chain to form a lactam linkage
  MOD_RES 21: note = Lys(C12)
  MOD_RES 23: note = Aib
  REGION 1..23: note = C-term amide
HXQGTFTSDYSRYLDERAAKKFX

SEQ ID NO: 482 - protein, 19 aa, synthetic construct
  REGION 1..19: note = Description of Artificial Sequence: Synthetic peptide
  MOD_RES 2: note = Aib
  MOD_RES 17: note = Aib
  MOD_RES 18: note = Lys(C12)
  MOD_RES 19: note = Aib
  REGION 1..19: note = C-term amide
HXQGTFTSDYSKYLDSXKX

SEQ ID NO: 483 - protein, 19 aa, synthetic construct
  REGION 1..19: note = Description of Artificial Sequence: Synthetic peptide
  MOD_RES 2: note = Aib
  MOD_RES 18: note = Lys(C12)
  MOD_RES 19: note = Aib
  REGION 1..19: note = C-term amide
HXQGTFTSDYSKYLDSRKX

SEQ ID NO: 484 - protein, 19 aa, synthetic construct
  REGION 1..19: note = Description of Artificial Sequence: Synthetic peptide
  MOD_RES 2: note = Aib
  MOD_RES 18: note = Lys(C12)
  MOD_RES 19: note = Ac5c
  REGION 1..19: note = C-term amide
HXQGTFTSDYSKYLDSRKX

SEQ ID NO: 485 - protein, 19 aa, synthetic construct
  REGION 1..19: note = Description of Artificial Sequence: Synthetic peptide
  MOD_RES 2: note = Aib
  MOD_RES 18: note = Lys(C8)
  MOD_RES 19: note = Aib
  REGION 1..19: note = C-term amide
HXQGTFTSDYSKYLDSRKX

SEQ ID NO: 486 - protein, 19 aa, synthetic construct
  REGION 1..19: note = Description of Artificial Sequence: Synthetic peptide
  MOD_RES 2: note = Aib
  MOD_RES 18: note = Lys(C16)
  MOD_RES 19: note = Aib
  REGION 1..19: note = C-term amide
HXQGTFTSDYSKYLDSRKX

SEQ ID NO: 487 - protein, 19 aa, synthetic construct
  REGION 1..19: note = Description of Artificial Sequence: Synthetic peptide
  MOD_RES 2: note = Aib
  MOD_RES 17: note = Aib
  MOD_RES 18: note = Lys(C12)
  MOD_RES 19: note = Aib
  REGION 1..19: note = C-term amide
HXQGTFTSDYSKYLDSXKX

SEQ ID NO: 488 - protein, 19 aa, synthetic construct
  REGION 1..19: note = Description of Artificial Sequence: Synthetic peptide
  MOD_RES 2: note = Aib
  MOD_RES 17: note = Aib
  MOD_RES 18: note = Lys(C8)
  MOD_RES 19: note = Aib
  REGION 1..19: note = C-term amide
HXQGTFTSDYSKYLDSXKX

SEQ ID NO: 489 - protein, 19 aa, synthetic construct
  REGION 1..19: note = Description of Artificial Sequence: Synthetic peptide
  MOD_RES 2: note = Aib
  MOD_RES 17: note = Aib
  MOD_RES 18: note = Lys(C1)
  MOD_RES 19: note = Aib
  REGION 1..19: note = C-term amide
HXQGTFTSDYSKYLDSXKX

SEQ ID NO: 490 - protein, 19 aa, synthetic construct
  REGION 1..19: note = Description of Artificial Sequence: Synthetic peptide
  MOD_RES 2: note = Aib
  MOD_RES 17: note = Aib
  MOD_RES 18: note = Lys(C16)
  MOD_RES 19: note = Aib
  REGION 1..19: note = C-term amide
HXQGTFTSDYSKYLDSXKX

SEQ ID NO: 491 - protein, 19 aa, synthetic construct
  REGION 1..19: note = Description of Artificial Sequence: Synthetic peptide
  MOD_RES 2: note = Aib
  MOD_RES 12: note = Lys is cyclized through side chain to form a lactam linkage
  REGION 16..19: note = misc_feature - Cyclic
  MOD_RES 16: note = Glu is cyclized through side chain to form a lactam linkage
  MOD_RES 17: note = Aib
  MOD_RES 18: note = Lys(C16)
  MOD_RES 19: note = Aib
  REGION 1..19: note = C-term amide
HXQGTFTSDYSKYLDEXKX

SEQ ID NO: 492 - protein, 19 aa, synthetic construct
  REGION 1..19: note = Description of Artificial Sequence: Synthetic peptide
  MOD_RES 2: note = Aib
  MOD_RES 12: note = Lys is cyclized through side chain to form a lactam linkage
  REGION 16..19: note = misc_feature - Cyclic
  MOD_RES 16: note = Glu is cyclized through side chain to form a lactam linkage
  MOD_RES 17: note = Aib
  MOD_RES 18: note = Lys(C12)
  MOD_RES 19: note = Aib
  REGION 1..19: note = C-term amide
HXQGTFTSDYSKYLDEXKX

SEQ ID NO: 493 - protein, 19 aa, synthetic construct
  REGION 1..19: note = Description of Artificial Sequence: Synthetic peptide
  MOD_RES 2: note = Aib
  MOD_RES 12: note = Lys is cyclized through side chain to form a lactam linkage
  REGION 16..19: note = misc_feature - Cyclic
  MOD_RES 16: note = Glu is cyclized through side chain to form a lactam linkage
  MOD_RES 17: note = Aib
  MOD_RES 18: note = Lys(C8)
  MOD_RES 19: note = Aib
  REGION 1..19: note = C-term amide
HXQGTFTSDYSKYLDEXKX

SEQ ID NO: 494 - protein, 19 aa, synthetic construct
  REGION 1..19: note = Description of Artificial Sequence: Synthetic peptide
  MOD_RES 2: note = Aib
  MOD_RES 12: note = Lys is cyclized through side chain to form a lactam linkage
  REGION 16..19: note = misc_feature - Cyclic
  MOD_RES 16: note = Glu is cyclized through side chain to form a lactam linkage
  MOD_RES 18: note = Lys(C16)
  MOD_RES 19: note = Aib
  REGION 1..19: note = C-term amide
HXQGTFTSDYSKYLDERKX

SEQ ID NO: 495 - protein, 19 aa, synthetic construct
  REGION 1..19: note = Description of Artificial Sequence: Synthetic peptide
  MOD_RES 2: note = Aib
  MOD_RES 12: note = Lys is cyclized through side chain to form a lactam linkage
  REGION 16..19: note = misc_feature - Cyclic
  MOD_RES 16: note = Glu is cyclized through side chain to form a lactam linkage
  MOD_RES 18: note = Lys(C12)
  MOD_RES 19: note = Aib
  REGION 1..19: note = C-term amide
HXQGTFTSDYSKYLDERKX

SEQ ID NO: 496 - protein, 19 aa, synthetic construct
  REGION 1..19: note = Description of Artificial Sequence: Synthetic peptide
  MOD_RES 2: note = Aib
  MOD_RES 12: note = Lys is cyclized through side chain to form a lactam linkage
  REGION 16..19: note = misc_feature - Cyclic
  MOD_RES 16: note = Glu is cyclized through side chain to form a lactam linkage
  MOD_RES 18: note = Lys(C8)
  MOD_RES 19: note = Aib
  REGION 1..19: note = C-term amide
HXQGTFTSDYSKYLDERKX

SEQ ID NO: 497 - protein, 19 aa, synthetic construct
  REGION 1..19: note = Description of Artificial Sequence: Synthetic peptide
  MOD_RES 2: note = Aib
  MOD_RES 12: note = Lys is cyclized through side chain to form a lactam linkage
  REGION 16..19: note = misc_feature - Cyclic
  MOD_RES 16: note = Glu is cyclized through side chain to form a lactam linkage
  MOD_RES 18: note = Lys(C12)
  MOD_RES 19: note = Ac5c
  REGION 1..19: note = C-term amide
HXQGTFTSDYSKYLDERKX

SEQ ID NO: 498 - protein, 18 aa, synthetic construct
  REGION 1..18: note = Description of Artificial Sequence: Synthetic peptide
  MOD_RES 2: note = Aib
  MOD_RES 17: note = Aib
  MOD_RES 18: note = Lys(C8)
  REGION 1..18: note = C-term amide
HXQGTFTSDYSKYLDRXK

SEQ ID NO: 499 - protein, 18 aa, synthetic construct
  REGION 1..18: note = Description of Artificial Sequence: Synthetic peptide
  MOD_RES 2: note = Aib
  MOD_RES 17: note = Aib
  MOD_RES 18: note = Lys(C12)
  REGION 1..18: note = C-term amide
HXQGTFTSDYSKYLDRXK

SEQ ID NO: 500 - protein, 18 aa, synthetic construct
  REGION 1..18: note = Description of Artificial Sequence: Synthetic peptide
  MOD_RES 2: note = Aib
  MOD_RES 17: note = Aib
  MOD_RES 18: note = Lys(C16)
  REGION 1..18: note = C-term amide
HXQGTFTSDYSKYLDRXK

SEQ ID NO: 501 - protein, 19 aa, synthetic construct
  REGION 1..19: note = Description of Artificial Sequence: Synthetic peptide
  MOD_RES 2: note = Aib
  MOD_RES 18: note = Aib
  MOD_RES 19: note = Lys(C8)
  REGION 1..19: note = C-term amide
HXQGTFTSDYSKYLDSRXK

SEQ ID NO: 502 - protein, 19 aa, synthetic construct
  REGION 1..19: note = Description of Artificial Sequence: Synthetic peptide
  MOD_RES 2: note = Aib
  MOD_RES 18: note = Aib
  MOD_RES 19: note = Lys(C12)
  REGION 1..19: note = C-term amide
HXQGTFTSDYSKYLDSRXK

SEQ ID NO: 503 - protein, 19 aa, synthetic construct
  REGION 1..19: note = Description of Artificial Sequence: Synthetic peptide
  MOD_RES 2: note = Aib
  MOD_RES 18: note = Aib
  MOD_RES 19: note = Lys(C16)
  REGION 1..19: note = C-term amide
HXQGTFTSDYSKYLDSRXK

SEQ ID NO: 504 - protein, 19 aa, synthetic construct
  REGION 1..19: note = Description of Artificial Sequence: Synthetic peptide
  MOD_RES 2: note = Aib
  MOD_RES 16: note = Aib
  MOD_RES 18: note = Aib
  MOD_RES 19: note = Lys(C8)
  REGION 1..19: note = C-term amide
HXQGTFTSDYSKYLDXRXK

SEQ ID NO: 505 - protein, 19 aa, synthetic construct
  REGION 1..19: note = Description of Artificial Sequence: Synthetic peptide
  MOD_RES 2: note = Aib
  MOD_RES 16: note = Aib
  MOD_RES 18: note = Aib
  MOD_RES 19: note = Lys(C12)
  REGION 1..19: note = C-term amide
HXQGTFTSDYSKYLDXRXK

SEQ ID NO: 506 - protein, 19 aa, synthetic construct
  REGION 1..19: note = Description of Artificial Sequence: Synthetic peptide
  MOD_RES 2: note = Aib
  MOD_RES 16: note = Aib
  MOD_RES 18: note = Aib
  MOD_RES 19: note = Lys(C16)
  REGION 1..19: note = C-term amide
HXQGTFTSDYSKYLDXRXK

SEQ ID NO: 507 - protein, 18 aa, synthetic construct
  REGION 1..18: note = Description of Artificial Sequence: Synthetic peptide
  MOD_RES 2: note = Aib
  MOD_RES 17: note = Aib
  MOD_RES 18: note = Lys(C8)
  REGION 1..18: note = C-term amide
HXQGTFTSDVSSYLERXK

SEQ ID NO: 508 - protein, 18 aa, synthetic construct
  REGION 1..18: note = Description of Artificial Sequence: Synthetic peptide
  MOD_RES 2: note = Aib
  MOD_RES 17: note = Aib
  MOD_RES 18: note = Lys(C12)
  REGION 1..18: note = C-term amide
HXQGTFTSDVSSYLERXK

SEQ ID NO: 509 - protein, 18 aa, synthetic construct
  REGION 1..18: note = Description of Artificial Sequence: Synthetic peptide
  MOD_RES 2: note = Aib
  MOD_RES 17: note = Aib
  MOD_RES 18: note = Lys(C16)
  REGION 1..18: note = C-term amide
HXQGTFTSDVSSYLERXK

SEQ ID NO: 510 - protein, 19 aa, synthetic construct
  REGION 1..19: note = Description of Artificial Sequence: Synthetic peptide
  MOD_RES 2: note = Aib
  MOD_RES 16: note = Aib
  MOD_RES 18..19: note = Lys(C8)
  REGION 1..19: note = C-term amide
HXQGTFTSDVSSYLEXRKK

SEQ ID NO: 511 - protein, 19 aa, synthetic construct
  REGION 1..19: note = Description of Artificial Sequence: Synthetic peptide
  MOD_RES 2: note = Aib
  MOD_RES 16: note = Aib
  MOD_RES 18..19: note = Lys(C12)
  REGION 1..19: note = C-term amide
HXQGTFTSDVSSYLEXRKK

SEQ ID NO: 512 - protein, 19 aa, synthetic construct
  REGION 1..19: note = Description of Artificial Sequence: Synthetic peptide
  MOD_RES 2: note = Aib
  MOD_RES 16: note = Aib
  MOD_RES 18..19: note = Lys(C16)
  REGION 1..19: note = C-term amide
HXQGTFTSDVSSYLEXRKK

SEQ ID NO: 513 - protein, 18 aa, synthetic construct
  REGION 1..18: note = Description of Artificial Sequence: Synthetic peptide
  MOD_RES 2: note = Aib
  MOD_RES 16: note = hArg
  MOD_RES 17: note = Aib
  MOD_RES 18: note = Lys(C8)
  REGION 1..18: note = C-term amide
HXQGTFTSDYSKYLDRXK

SEQ ID NO: 514 - protein, 18 aa, synthetic construct
  REGION 1..18: note = Description of Artificial Sequence: Synthetic peptide
  MOD_RES 2: note = Aib
  MOD_RES 16: note = hArg
  MOD_RES 17: note = Aib
  MOD_RES 18: note = Lys(C12)
  REGION 1..18: note = C-term amide
HXQGTFTSDYSKYLDRXK

SEQ ID NO: 515 - protein, 18 aa, synthetic construct
  REGION 1..18: note = Description of Artificial Sequence: Synthetic peptide
  MOD_RES 2: note = Aib
  MOD_RES 16: note = hArg
  MOD_RES 17: note = Aib
  MOD_RES 18: note = Lys(C16)
  REGION 1..18: note = C-term amide
HXQGTFTSDYSKYLDRXK

SEQ ID NO: 516 - protein, 19 aa, synthetic construct
  REGION 1..19: note = Description of Artificial Sequence: Synthetic peptide
  MOD_RES 2: note = Aib
  MOD_RES 16: note = Aib
  MOD_RES 17: note = hArg
  MOD_RES 18: note = Aib
  MOD_RES 19: note = Lys(C8)
  REGION 1..19: note = C-term amide
HXQGTFTSDYSKYLDXRXK

SEQ ID NO: 517 - protein, 19 aa, synthetic construct
  REGION 1..19: note = Description of Artificial Sequence: Synthetic peptide
  MOD_RES 2: note = Aib
  MOD_RES 16: note = Aib
  MOD_RES 17: note = hArg
  MOD_RES 18: note = Aib
  MOD_RES 19: note = Lys(C12)
  REGION 1..19: note = C-term amide
HXQGTFTSDYSKYLDXRXK

SEQ ID NO: 518 - protein, 19 aa, synthetic construct
  REGION 1..19: note = Description of Artificial Sequence: Synthetic peptide
  MOD_RES 2: note = Aib
  MOD_RES 16: note = Aib
  MOD_RES 17: note = hArg
  MOD_RES 18: note = Aib
  MOD_RES 19: note = Lys(C16)
  REGION 1..19: note = C-term amide
HXQGTFTSDYSKYLDXRXK

SEQ ID NO: 519 - protein, 18 aa, synthetic construct
  REGION 1..18: note = Description of Artificial Sequence: Synthetic peptide
  MOD_RES 2: note = Aib
  MOD_RES 16: note = hArg
  MOD_RES 17: note = Aib
  MOD_RES 18: note = Lys(C8)
  REGION 1..18: note = C-term amide
HXQGTFTSDVSSYLERXK

SEQ ID NO: 520 - protein, 18 aa, synthetic construct
  REGION 1..18: note = Description of Artificial Sequence: Synthetic peptide
  MOD_RES 2: note = Aib
  MOD_RES 16: note = hArg
  MOD_RES 17: note = Aib
  MOD_RES 18: note = Lys(C12)
  REGION 1..18: note = C-term amide
HXQGTFTSDVSSYLERXK

SEQ ID NO: 521 - protein, 22 aa, synthetic construct
  REGION 1..22: note = Description of Artificial Sequence: Synthetic peptide
  MOD_RES 21: note = Lys(C12)
  MOD_RES 22: note = Aib
  REGION 1..22: note = C-term amide
HSQGTFTSDYSKYLDSRRAQKX

SEQ ID NO: 522 - protein, 21 aa, synthetic construct
  REGION 1..21: note = Description of Artificial Sequence: Synthetic peptide
  MOD_RES 20: note = Lys(C12)
  MOD_RES 21: note = Aib
  REGION 1..21: note = C-term amide
HSQGTFTSDYSKYLDSRRAKX

SEQ ID NO: 523 - protein, 20 aa, synthetic construct
  REGION 1..20: note = Description of Artificial Sequence: Synthetic peptide
  MOD_RES 19: note = Lys(C12)
  MOD_RES 20: note = Aib
  REGION 1..20: note = C-term amide
HSQGTFTSDYSKYLDSRRKX

SEQ ID NO: 524 - protein, 19 aa, synthetic construct
  REGION 1..19: note = Description of Artificial Sequence: Synthetic peptide
  MOD_RES 18: note = Lys(C12)
  MOD_RES 19: note = Aib
  REGION 1..19: note = C-term amide
HSQGTFTSDYSKYLDSRKX

SEQ ID NO: 525 - protein, 18 aa, synthetic construct
  REGION 1..18: note = Description of Artificial Sequence: Synthetic peptide
  MOD_RES 17: note = Lys(C12)
  MOD_RES 18: note = Aib
  REGION 1..18: note = C-term amide
HSQGTFTSDYSKYLDSKX

SEQ ID NO: 526 - protein, 17 aa, synthetic construct
  REGION 1..17: note = Description of Artificial Sequence: Synthetic peptide
  MOD_RES 16: note = Lys(C12)
  MOD_RES 17: note = Aib
  REGION 1..17: note = C-term amide
HSQGTFTSDYSKYLDKX

SEQ ID NO: 527 - protein, 29 aa, synthetic construct
  REGION 1..29: note = Description of Artificial Sequence: Synthetic peptide
  MOD_RES 2: note = Aib
  REGION 16..20: note = misc_feature - Cyclic
  MOD_RES 16: note = Glu is cyclized through side chain to form a lactam linkage
  MOD_RES 20: note = Lys is cyclized through side chain to form a lactam linkage
  MOD_RES 24: note = Lys(C12)
  REGION 1..29: note = C-term amide
HXQGTFTSDYSKYLDEQAAKEFIKWLMNT

SEQ ID NO: 528 - protein, 21 aa, synthetic construct
  REGION 1..21: note = Description of Artificial Sequence: Synthetic peptide
  MOD_RES 21: note = Lys(C12)
  REGION 1..21: note = C-term amide
HSQGTFTSDYSKYLDSRRAQK

SEQ ID NO: 529 - protein, 20 aa, synthetic construct
  REGION 1..20: note = Description of Artificial Sequence: Synthetic peptide
  MOD_RES 20: note = Lys(C12)
  REGION 1..20: note = C-term amide
HSQGTFTSDYSKYLDSRRAK

SEQ ID NO: 530 - protein, 19 aa, synthetic construct
  REGION 1..19: note = Description of Artificial Sequence: Synthetic peptide
  MOD_RES 19: note = Lys(C12)
  REGION 1..19: note = C-term amide
HSQGTFTSDYSKYLDSRRK

SEQ ID NO: 531 - protein, 18 aa, synthetic construct
  REGION 1..18: note = Description of Artificial Sequence: Synthetic peptide
  MOD_RES 18: note = Lys(C12)
  REGION 1..18: note = C-term amide
HSQGTFTSDYSKYLDSRK

SEQ ID NO: 532 - protein, 17 aa, synthetic construct
  REGION 1..17: note = Description of Artificial Sequence: Synthetic peptide
  MOD_RES 17: note = Lys(C12)
  REGION 1..17: note = C-term amide
HSQGTFTSDYSKYLDSK

SEQ ID NO: 533 - protein, 16 aa, synthetic construct
  REGION 1..16: note = Description of Artificial Sequence: Synthetic peptide
  MOD_RES 16: note = Lys(C12)
  REGION 1..16: note = C-term amide
HSQGTFTSDYSKYLDK

SEQ ID NO: 534 - protein, 21 aa, synthetic construct
  REGION 1..21: note = Description of Artificial Sequence: Synthetic peptide
  MOD_RES 20: note = Lys(C12)
  MOD_RES 21: note = Aib
  REGION 1..21: note = C-term amide
HAEGTFTSDVSSYLEGQAAKX

SEQ ID NO: 535 - protein, 20 aa, synthetic construct
  REGION 1..20: note = Description of Artificial Sequence: Synthetic peptide
  MOD_RES 19: note = Lys(C12)
  MOD_RES 20: note = Aib
  REGION 1..20: note = C-term amide
HAEGTFTSDVSSYLEGQAKX

SEQ ID NO: 536 - protein, 19 aa, synthetic construct
  REGION 1..19: note = Description of Artificial Sequence: Synthetic peptide
  MOD_RES 18: note = Lys(C12)
  MOD_RES 19: note = Aib
  REGION 1..19: note = C-term amide
HAEGTFTSDVSSYLEGQKX

SEQ ID NO: 537 - protein, 18 aa, synthetic construct
  REGION 1..18: note = Description of Artificial Sequence: Synthetic peptide
  MOD_RES 17: note = Lys(C12)
  MOD_RES 18: note = Aib
  REGION 1..18: note = C-term amide
HAEGTFTSDVSSYLEGKX

SEQ ID NO: 538 - protein, 17 aa, synthetic construct
  REGION 1..17: note = Description of Artificial Sequence: Synthetic peptide
  MOD_RES 16: note = Lys(C12)
  MOD_RES 17: note = Aib
  REGION 1..17: note = C-term amide
HAEGTFTSDVSSYLEKX

SEQ ID NO: 539 - protein, 16 aa, synthetic construct
  REGION 1..16: note = Description of Artificial Sequence: Synthetic peptide
  MOD_RES 15: note = Lys(C12)
  MOD_RES 16: note = Aib
  REGION 1..16: note = C-term amide
HAEGTFTSDVSSYLKX

SEQ ID NO: 540 - protein, 17 aa, synthetic construct
  REGION 1..17: note = Description of Artificial Sequence: Synthetic peptide
  MOD_RES 2: note = Aib
  MOD_RES 16: note = Lys(C12)
  MOD_RES 17: note = Aib
  REGION 1..17: note = C-term amide
HXQGTFTSDYSKYLDKX

SEQ ID NO: 541 - protein, 17 aa, synthetic construct
  REGION 1..17: note = Description of Artificial Sequence: Synthetic peptide
  MOD_RES 2: note = Aib
  MOD_RES 16: note = Lys(C12)
  MOD_RES 17: note = Ac4c
  REGION 1..17: note = C-term amide
HXQGTFTSDYSKYLDKX

SEQ ID NO: 542 - protein, 19 aa, synthetic construct
  REGION 1..19: note = Description of Artificial Sequence: Synthetic peptide
  MOD_RES 2: note = Aib
  MOD_RES 16: note = Lys(C12)
  MOD_RES 19: note = Aib
  REGION 1..19: note = C-term amide
HXQGTFTSDYSKYLDKRRX

SEQ ID NO: 543 - protein, 18 aa, synthetic construct
  REGION 1..18: note = Description of Artificial Sequence: Synthetic peptide
  MOD_RES 2: note = Aib
  MOD_RES 16: note = Lys(C12)
  MOD_RES 17: note = Aib
  REGION 1..18: note = C-term amide
HXQGTFTSDYSKYLDKXR

SEQ ID NO: 544 - protein, 18 aa, synthetic construct
  REGION 1..18: note = Description of Artificial Sequence: Synthetic peptide
  MOD_RES 2: note = Aib
  MOD_RES 16: note = Lys(C12)
  MOD_RES 18: note = Aib
  REGION 1..18: note = C-term amide
HXQGTFTSDYSKYLDKRX

SEQ ID NO: 545 - protein, 18 aa, synthetic construct
  REGION 1..18: note = Description of Artificial Sequence: Synthetic peptide
  MOD_RES 2: note = Aib
  MOD_RES 16: note = Lys(C12)
  MOD_RES 17: note = hArg
  MOD_RES 18: note = Aib
  REGION 1..18: note = C-term amide
HXQGTFTSDYSKYLDKRX

SEQ ID NO: 546 - protein, 18 aa, synthetic construct
  REGION 1..18: note = Description of Artificial Sequence: Synthetic peptide
  MOD_RES 2: note = Aib
  MOD_RES 17: note = Lys(C12)
  MOD_RES 18: note = Aib
  REGION 1..18: note = C-term amide
HXQGTFTSDYSKYLDSKX

SEQ ID NO: 547 - protein, 18 aa, synthetic construct
  REGION 1..18: note = Description of Artificial Sequence: Synthetic peptide
  MOD_RES 2: note = Aib
  MOD_RES 17: note = Lys(C12)
  MOD_RES 18: note = Ac4c
  REGION 1..18: note = C-term amide
HXQGTFTSDYSKYLDSKX

SEQ ID NO: 548 - protein, 19 aa, synthetic construct
  REGION 1..19: note = Description of Artificial Sequence: Synthetic peptide
  MOD_RES 2: note = Aib
  MOD_RES 17: note = Lys(C12)
  MOD_RES 19: note = Aib
  REGION 1..19: note = C-term amide
HXQGTFTSDYSKYLDSKRX

SEQ ID NO: 549 - protein, 19 aa, synthetic construct
  REGION 1..19: note = Description of Artificial Sequence: Synthetic peptide
  MOD_RES 2: note = Aib
  MOD_RES 17: note = Lys(C12)
  MOD_RES 18: note = hArg
  MOD_RES 19: note = Aib
  REGION 1..19: note = C-term amide
HXQGTFTSDYSKYLDSKRX

SEQ ID NO: 550 - protein, 19 aa, synthetic construct
  REGION 1..19: note = Description of Artificial Sequence: Synthetic peptide
  MOD_RES 2: note = Aib
  MOD_RES 18: note = Lys(C12)
  MOD_RES 19: note = Aib
  REGION 1..19: note = C-term amide
HXQGTFTSDYSKYLDSRKX

SEQ ID NO: 551 - protein, 19 aa, synthetic construct
  REGION 1..19: note = Description of Artificial Sequence: Synthetic peptide
  MOD_RES 2: note = Aib
  MOD_RES 18: note = Lys(C12)
  MOD_RES 19: note = Ac4c
  REGION 1..19: note = C-term amide
HXQGTFTSDYSKYLDSRKX

SEQ ID NO: 552 - protein, 19 aa, synthetic construct
  REGION 1..19: note = Description of Artificial Sequence: Synthetic peptide
  MOD_RES 2: note = Aib
  MOD_RES 17: note = hArg
  MOD_RES 18: note = Lys(C12)
  MOD_RES 19: note = Aib
  REGION 1..19: note = C-term amide
HXQGTFTSDYSKYLDSRKX

SEQ ID NO: 553 - protein, 19 aa, synthetic construct
  REGION 1..19: note = Description of Artificial Sequence: Synthetic peptide
  MOD_RES 2: note = Aib
  MOD_RES 16: note = Aib
  MOD_RES 18: note = Lys(C12)
  MOD_RES 19: note = Aib
  REGION 1..19: note = C-term amide
HXQGTFTSDYSKYLDXRKX

SEQ ID NO: 554 - protein, 19 aa, synthetic construct
  REGION 1..19: note = Description of Artificial Sequence: Synthetic peptide
  MOD_RES 2: note = Aib
  MOD_RES 18: note = Lys(C14)
  MOD_RES 19: note = Aib
  REGION 1..19: note = C-term amide
HXQGTFTSDYSKYLDSRKX

SEQ ID NO: 555 - protein, 19 aa, synthetic construct
  REGION 1..19: note = Description of Artificial Sequence: Synthetic peptide
  MOD_RES 2: note = Aib
  MOD_RES 18: note = Lys(C16)
  MOD_RES 19: note = Aib
  REGION 1..19: note = C-term amide
HXQGTFTSDYSKYLDSRKX

SEQ ID NO: 556 - protein, 19 aa, synthetic construct
  REGION 1..19: note = Description of Artificial Sequence: Synthetic peptide
  MOD_RES 2: note = Aib
  MOD_RES 18: note = Lys(C18)
  MOD_RES 19: note = Aib
  REGION 1..19: note = C-term amide
HXQGTFTSDYSKYLDSRKX

SEQ ID NO: 557 - protein, 19 aa, synthetic construct
  REGION 1..19: note = Description of Artificial Sequence: Synthetic peptide
  MOD_RES 2: note = Aib
  MOD_RES 16: note = Aib
  MOD_RES 18: note = Lys(C12)
  MOD_RES 19: note = Aib
  REGION 1..19: note = C-term amide
HXQGTFTSDYSKYLDXQKX

SEQ ID NO: 558 - protein, 20 aa, synthetic construct
  REGION 1..20: note = Description of Artificial Sequence: Synthetic peptide
  MOD_RES 2: note = Aib
  REGION 16..20: note = misc_feature - Cyclic
  MOD_RES 16: note = Glu is cyclized through side chain to form a lactam linkage
  MOD_RES 18: note = Lys(C12)
  MOD_RES 20: note = Lys is cyclized through side chain to form a lactam linkage
  REGION 1..20: note = C-term amide
HXQGTFTSDYSKYLDEQKAK

SEQ ID NO: 559 - protein, 20 aa, synthetic construct
  REGION 1..20: note = Description of Artificial Sequence: Synthetic peptide
  MOD_RES 2: note = Aib
  REGION 16..20: note = misc_feature - Cyclic
  MOD_RES 16: note = Glu is cyclized through side chain to form a lactam linkage
  MOD_RES 18: note = Lys(C14)
  MOD_RES 20: note = Lys is cyclized through side chain to form a lactam linkage
  REGION 1..20: note = C-term amide
HXQGTFTSDYSKYLDEQKAK

SEQ ID NO: 560 - protein, 20 aa, synthetic construct
  REGION 1..20: note = Description of Artificial Sequence: Synthetic peptide
  MOD_RES 2: note = Aib
  REGION 16..20: note = misc_feature - Cyclic
  MOD_RES 16: note = Glu is cyclized through side chain to form a lactam linkage
  MOD_RES 18: note = Lys(C16)
  MOD_RES 20: note = Lys is cyclized through side chain to form a lactam linkage
  REGION 1..20: note = C-term amide
HXQGTFTSDYSKYLDEQKAK

SEQ ID NO: 561 - protein, 20 aa, synthetic construct
  REGION 1..20: note = Description of Artificial Sequence: Synthetic peptide
  MOD_RES 2: note = Aib
  REGION 16..20: note = misc_feature - Cyclic
  MOD_RES 16: note = Glu is cyclized through side chain to form a lactam linkage
  MOD_RES 18: note = Lys(C18)
  MOD_RES 20: note = Lys is cyclized through side chain to form a lactam linkage
  REGION 1..20: note = C-term amide
HXQGTFTSDYSKYLDEQKAK

SEQ ID NO: 562 - protein, 20 aa, synthetic construct
  REGION 1..20: note = Description of Artificial Sequence: Synthetic peptide
  MOD_RES 2: note = Aib
  REGION 16..20: note = misc_feature - Cyclic
  MOD_RES 16: note = Glu is cyclized through side chain to form a lactam linkage
  MOD_RES 18: note = Lys(C20)
  MOD_RES 20: note = Lys is cyclized through side chain to form a lactam linkage
  REGION 1..20: note = C-term amide
HXQGTFTSDYSKYLDEQKAK

SEQ ID NO: 563 - protein, 20 aa, synthetic construct
  REGION 1..20: note = Description of Artificial Sequence: Synthetic peptide
  MOD_RES 2: note = Aib
  MOD_RES 18: note = Lys(C12)
  MOD_RES 19..20: note = Aib
  REGION 1..20: note = C-term amide
HXQGTFTSDYSKYLDSRKXX

SEQ ID NO: 564 - protein, 20 aa, synthetic construct
  REGION 1..20: note = Description of Artificial Sequence: Synthetic peptide
  MOD_RES 2: note = Aib
  MOD_RES 18: note = Lys(C14)
  MOD_RES 19..20: note = Aib
  REGION 1..20: note = C-term amide
HXQGTFTSDYSKYLDSRKXX

SEQ ID NO: 565 - protein, 20 aa, synthetic construct
  REGION 1..20: note = Description of Artificial Sequence: Synthetic peptide
  MOD_RES 2: note = Aib
  MOD_RES 18: note = Lys(C16)
  MOD_RES 19..20: note = Aib
  REGION 1..20: note = C-term amide
HXQGTFTSDYSKYLDSRKXX

SEQ ID NO: 566 - protein, 20 aa, synthetic construct
  REGION 1..20: note = Description of Artificial Sequence: Synthetic peptide
  MOD_RES 2: note = Aib
  MOD_RES 18: note = Lys(C18)
  MOD_RES 19..20: note = Aib
  REGION 1..20: note = C-term amide
HXQGTFTSDYSKYLDSRKXX

SEQ ID NO: 567 - protein, 20 aa, synthetic construct
  REGION 1..20: note = Description of Artificial Sequence: Synthetic peptide
  MOD_RES 2: note = Aib
  MOD_RES 18: note = Lys(C20)
  MOD_RES 19..20: note = Aib
  REGION 1..20: note = C-term amide
HXQGTFTSDYSKYLDSRKXX

SEQ ID NO: 568 - protein, 18 aa, synthetic construct
  REGION 1..18: note = Description of Artificial Sequence: Synthetic peptide
  MOD_RES 2: note = Aib
  MOD_RES 16..17: note = Aib
  MOD_RES 18: note = Lys(C12)
  REGION 1..18: note = C-term amide
HXQGTFTSDYSKYLDXXK

SEQ ID NO: 569 - protein, 18 aa, synthetic construct
  REGION 1..18: note = Description of Artificial Sequence: Synthetic peptide
  MOD_RES 2: note = Aib
  MOD_RES 16..17: note = Aib
  MOD_RES 18: note = Lys(C14)
  REGION 1..18: note = C-term amide
HXQGTFTSDYSKYLDXXK

SEQ ID NO: 570 - protein, 18 aa, synthetic construct
  REGION 1..18: note = Description of Artificial Sequence: Synthetic peptide
  MOD_RES 2: note = Aib
  MOD_RES 16..17: note = Aib
  MOD_RES 18: note = Lys(C16)
  REGION 1..18: note = C-term amide
HXQGTFTSDYSKYLDXXK

SEQ ID NO: 571 - protein, 18 aa, synthetic construct
  REGION 1..18: note = Description of Artificial Sequence: Synthetic peptide
  MOD_RES 2: note = Aib
  MOD_RES 16..17: note = Aib
  MOD_RES 18: note = Lys(C18)
  REGION 1..18: note = C-term amide
HXQGTFTSDYSKYLDXXK

SEQ ID NO: 572 - protein, 18 aa, synthetic construct
  REGION 1..18: note = Description of Artificial Sequence: Synthetic peptide
  MOD_RES 2: note = Aib
  MOD_RES 16..17: note = Aib
  MOD_RES 18: note = Lys(C20)
  REGION 1..18: note = C-term amide
HXQGTFTSDYSKYLDXXK

SEQ ID NO: 573 - protein, 20 aa, synthetic construct
  REGION 1..20: note = Description of Artificial Sequence: Synthetic peptide
  MOD_RES 2: note = Aib
  MOD_RES 17: note = Aib
  MOD_RES 18: note = Lys(C12)
  MOD_RES 19..20: note = Aib
  REGION 1..20: note = C-term amide
HXQGTFTSDYSKYLDSXKXX

SEQ ID NO: 574 - protein, 20 aa, synthetic construct
  REGION 1..20: note = Description of Artificial Sequence: Synthetic peptide
  MOD_RES 2: note = Aib
  MOD_RES 17: note = Aib
  MOD_RES 18: note = Lys(C14)
  MOD_RES 19..20: note = Aib
  REGION 1..20: note = C-term amide
HXQGTFTSDYSKYLDSXKXX

SEQ ID NO: 575 - protein, 20 aa, synthetic construct
  REGION 1..20: note = Description of Artificial Sequence: Synthetic peptide
  MOD_RES 2: note = Aib
  MOD_RES 17: note = Aib
  MOD_RES 18: note = Lys(C16)
  MOD_RES 19..20: note = Aib
  REGION 1..20: note = C-term amide
HXQGTFTSDYSKYLDSXKXX

SEQ ID NO: 576 - protein, 20 aa, synthetic construct
  REGION 1..20: note = Description of Artificial Sequence: Synthetic peptide
  MOD_RES 2: note = Aib
  MOD_RES 17: note = Aib
  MOD_RES 18: note = Lys(C18)
  MOD_RES 19..20: note = Aib
  REGION 1..20: note = C-term amide
HXQGTFTSDYSKYLDSXKXX

SEQ ID NO: 577 - protein, 20 aa, synthetic construct
  REGION 1..20: note = Description of Artificial Sequence: Synthetic peptide
  MOD_RES 2: note = Aib
  MOD_RES 17: note = Aib
  MOD_RES 18: note = Lys(C20)
  MOD_RES 19..20: note = Aib
  REGION 1..20: note = C-term amide
HXQGTFTSDYSKYLDSXKXX

SEQ ID NO: 578 - protein, 20 aa, synthetic construct
  REGION 1..20: note = Description of Artificial Sequence: Synthetic peptide
  MOD_RES 2: note = Aib
  MOD_RES 17: note = Aib
  MOD_RES 18: note = Lys(C22)
  MOD_RES 19..20: note = Aib
  REGION 1..20: note = C-term amide
HXQGTFTSDYSKYLDSXKXX

SEQ ID NO: 579 - protein, 19 aa, synthetic construct
  REGION 1..19: note = Description of Artificial Sequence: Synthetic peptide
  MOD_RES 2: note = Aib
  MOD_RES 12: note = Lys is cyclized through side chain to form a lactam linkage
  REGION 16..19: note = misc_feature - Cyclic
  MOD_RES 16: note = Glu is cyclized through side chain to form a lactam linkage
  MOD_RES 18: note = Lys(C12)
  MOD_RES 19: note = Aib
  REGION 1..19: note = C-term amide
HXQGTFTSDYSKYLDERKX

SEQ ID NO: 580 - protein, 19 aa, synthetic construct
  REGION 1..19: note = Description of Artificial Sequence: Synthetic peptide
  MOD_RES 2: note = Aib
  MOD_RES 12: note = Lys is cyclized through side chain to form a lactam linkage
  REGION 16..19: note = misc_feature - Cyclic
  MOD_RES 16: note = Glu is cyclized through side chain to form a lactam linkage
  MOD_RES 18: note = Lys(C14)
  MOD_RES 19: note = Aib
  REGION 1..19: note = C-term amide
HXQGTFTSDYSKYLDERKX

SEQ ID NO: 581 - protein, 19 aa, synthetic construct
  REGION 1..19: note = Description of Artificial Sequence: Synthetic peptide
  MOD_RES 2: note = Aib
  MOD_RES 12: note = Lys is cyclized through side chain to form a lactam linkage
  REGION 16..19: note = misc_feature - Cyclic
  MOD_RES 16: note = Glu is cyclized through side chain to form a lactam linkage
  MOD_RES 18: note = Lys(C16)
  MOD_RES 19: note = Aib
  REGION 1..19: note = C-term amide
HXQGTFTSDYSKYLDERKX

SEQ ID NO: 582 - protein, 19 aa, synthetic construct
  REGION 1..19: note = Description of Artificial Sequence: Synthetic peptide
  MOD_RES 2: note = Aib
  MOD_RES 12: note = Lys is cyclized through side chain to form a lactam linkage
  REGION 16..19: note = misc_feature - Cyclic
  MOD_RES 16: note = Glu is cyclized through side chain to form a lactam linkage
  MOD_RES 18: note = Lys(C18)
  MOD_RES 19: note = Aib
  REGION 1..19: note = C-term amide
HXQGTFTSDYSKYLDERKX

SEQ ID NO: 583 - protein, 19 aa, synthetic construct
  REGION 1..19: note = Description of Artificial Sequence: Synthetic peptide
  MOD_RES 2: note = Aib
  MOD_RES 12: note = Lys is cyclized through side chain to form a lactam linkage
  REGION 16..19: note = misc_feature - Cyclic
  MOD_RES 16: note = Glu is cyclized through side chain to form a lactam linkage
  MOD_RES 18: note = Lys(C20)
  MOD_RES 19: note = Aib
  REGION 1..19: note = C-term amide
HXQGTFTSDYSKYLDERKX

SEQ ID NO: 584 - protein, 19 aa, synthetic construct
  REGION 1..19: note = Description of Artificial Sequence: Synthetic peptide
  MOD_RES 2: note = Aib
  MOD_RES 12: note = Lys is cyclized through side chain to form a lactam linkage
  REGION 16..19: note = misc_feature - Cyclic
  MOD_RES 16: note = Glu is cyclized through side chain to form a lactam linkage
  MOD_RES 18: note = Lys(C12)
  MOD_RES 19: note = Aib
  REGION 1..19: note = C-term amide
HXQGTFTSDYSKYLDEQKX

SEQ ID NO: 585 - protein, 19 aa, synthetic construct
  REGION 1..19: note = Description of Artificial Sequence: Synthetic peptide
  MOD_RES 2: note = Aib
  MOD_RES 12: note = Lys is cyclized through side chain to form a lactam linkage
  MOD_RES 16: note = Glu is cyclized through side chain to form a lactam linkage
  MOD_RES 18: note = Lys(C14)
  MOD_RES 19: note = Aib
  REGION 1..19: note = C-term amide
HXQGTFTSDYSKYLDEQKX

SEQ ID NO: 586 - protein, 19 aa, synthetic construct
  REGION 1..19: note = Description of Artificial Sequence: Synthetic peptide
  MOD_RES 2: note = Aib
  MOD_RES 12: note = Lys is cyclized through side chain to form a lactam linkage
  REGION 16..19: note = misc_feature - Cyclic
  MOD_RES 16: note = Glu is cyclized through side chain to form a lactam linkage
  MOD_RES 18: note = Lys(C16)
  MOD_RES 19: note = Aib
  REGION 1..19: note = C-term amide
HXQGTFTSDYSKYLDEQKX

SEQ ID NO: 587 - protein, 19 aa, synthetic construct
  REGION 1..19: note = Description of Artificial Sequence: Synthetic peptide
  MOD_RES 2: note = Aib
  MOD_RES 12: note = Lys is cyclized through side chain to form a lactam linkage
  REGION 16..19: note = misc_feature - Cyclic
  MOD_RES 16: note = Glu is cyclized through side chain to form a lactam linkage
  MOD_RES 18: note = Lys(C18)
  MOD_RES 19: note = Aib
  REGION 1..19: note = C-term amide
HXQGTFTSDYSKYLDEQKX

SEQ ID NO: 588 - protein, 19 aa, synthetic construct
  REGION 1..19: note = Description of Artificial Sequence: Synthetic peptide
  MOD_RES 2: note = Aib
  MOD_RES 12: note = Lys is cyclized through side chain to form a lactam linkage
  REGION 16..19: note = misc_feature - Cyclic
  MOD_RES 16: note = Glu is cyclized through side chain to form a lactam linkage
  MOD_RES 18: note = Lys(C20)
  MOD_RES 19: note = Aib
  REGION 1..19: note = C-term amide
HXQGTFTSDYSKYLDEQKX

SEQ ID NO: 589 - protein, 20 aa, synthetic construct
  REGION 1..20: note = Description of Artificial Sequence: Synthetic peptide
  MOD_RES 2: note = Aib
  REGION 12..16: note = misc_feature - Cyclic
  MOD_RES 12: note = Glu is cyclized through side chain to form a lactam linkage
  MOD_RES 16: note = Lys is cyclized through side chain to form a lactam linkage
  MOD_RES 18: note = Lys(C12)
  MOD_RES 19..20: note = Aib
  REGION 1..20: note = C-term amide
HXQGTFTSDYSEYLDKRKXX

SEQ ID NO: 590 - protein, 20 aa, synthetic construct
  REGION 1..20: note = Description of Artificial Sequence: Synthetic peptide
  MOD_RES 2: note = Aib
  REGION 12..16: note = misc_feature - Cyclic
  MOD_RES 12: note = Glu is cyclized through side chain to form a lactam linkage
  MOD_RES 16: note = Lys is cyclized through side chain to form a lactam linkage
  MOD_RES 18: note = Lys(C14)
  MOD_RES 19..20: note = Aib
  REGION 1..20: note = C-term amide
HXQGTFTSDYSEYLDKRKXX

SEQ ID NO: 591 - protein, 20 aa, synthetic construct
  REGION 1..20: note = Description of Artificial Sequence: Synthetic peptide
  MOD_RES 2: note = Aib
  REGION 12..16: note = misc_feature - Cyclic
  MOD_RES 12: note = Glu is cyclized through side chain to form a lactam linkage
  MOD_RES 16: note = Lys is cyclized through side chain to form a lactam linkage
  MOD_RES 18: note = Lys(C16)
  MOD_RES 19..20: note = Aib
  REGION 1..20: note = C-term amide
HXQGTFTSDYSEYLDKRKXX

SEQ ID NO: 592 - protein, 20 aa, synthetic construct
  REGION 1..20: note = Description of Artificial Sequence: Synthetic peptide
  MOD_RES 2: note = Aib
  REGION 12..16: note = misc_feature - Cyclic
  MOD_RES 12: note = Glu is cyclized through side chain to form a lactam linkage
  MOD_RES 16: note = Lys is cyclized through side chain to form a lactam linkage
  MOD_RES 18: note = Lys(C18)
  MOD_RES 19..20: note = Aib
  REGION 1..20: note = C-term amide
HXQGTFTSDYSEYLDKRKXX

SEQ ID NO: 593 - protein, 20 aa, synthetic construct
  REGION 1..20: note = Description of Artificial Sequence: Synthetic peptide
  MOD_RES 2: note = Aib
  REGION 12..16: note = misc_feature - Cyclic
  MOD_RES 12: note = Glu is cyclized through side chain to form a lactam linkage
  MOD_RES 16: note = Lys is cyclized through side chain to form a lactam linkage
  MOD_RES 18: note = Lys(C20)
  MOD_RES 19..20: note = Aib
  REGION 1..20: note = C-term amide
HXQGTFTSDYSEYLDKRKXX

SEQ ID NO: 594 - protein, 20 aa, synthetic construct
  REGION 1..20: note = Description of Artificial Sequence: Synthetic peptide
  MOD_RES 2: note = Aib
  REGION 12..16: note = misc_feature - Cyclic
  MOD_RES 12: note = Glu is cyclized through side chain to form a lactam linkage
  MOD_RES 16: note = Lys is cyclized through side chain to form a lactam linkage
  MOD_RES 17: note = hArg
  MOD_RES 18: note = Lys(C12)
  MOD_RES 19..20: note = Aib
  REGION 1..20: note = C-term amide
HXQGTFTSDYSEYLDKRKXX

SEQ ID NO: 595 - protein, 20 aa, synthetic construct
  REGION 1..20: note = Description of Artificial Sequence: Synthetic peptide
  MOD_RES 2: note = Aib
  REGION 12..16: note = misc_feature - Cyclic
  MOD_RES 12: note = Glu is cyclized through side chain to form a lactam linkage
  MOD_RES 16: note = Lys is cyclized through side chain to form a lactam linkage
  MOD_RES 17: note = hArg
  MOD_RES 18: note = Lys(C14)
  MOD_RES 19..20: note = Aib
  REGION 1..20: note = C-term amide
HXQGTFTSDYSEYLDKRKXX

SEQ ID NO: 596 - protein, 20 aa, synthetic construct
  REGION 1..20: note = Description of Artificial Sequence: Synthetic peptide
  MOD_RES 2: note = Aib
  REGION 12..16: note = misc_feature - Cyclic
  MOD_RES 12: note = Glu is cyclized through side chain to form a lactam linkage
  MOD_RES 16: note = Lys is cyclized through side chain to form a lactam linkage
  MOD_RES 17: note = hArg
  MOD_RES 18: note = Lys(C16)
  MOD_RES 19..20: note = Aib
  REGION 1..20: note = C-term amide
HXQGTFTSDYSEYLDKRKXX

SEQ ID NO: 597 - protein, 20 aa, synthetic construct
  REGION 1..20: note = Description of Artificial Sequence: Synthetic peptide
  MOD_RES 2: note = Aib
  REGION 12..16: note = misc_feature - Cyclic
  MOD_RES 12: note = Glu is cyclized through side chain to form a lactam linkage
  MOD_RES 16: note = Lys is cyclized through side chain to form a lactam linkage
  MOD_RES 17: note = hArg
  MOD_RES 18: note = Lys(C18)
  MOD_RES 19..20: note = Aib
  REGION 1..20: note = C-term amide
HXQGTFTSDYSEYLDKRKXX

SEQ ID NO: 598 - protein, 20 aa, synthetic construct
  REGION 1..20: note = Description of Artificial Sequence: Synthetic peptide
  MOD_RES 2: note = Aib
  REGION 12..16: note = misc_feature - Cyclic
  MOD_RES 12: note = Glu is cyclized through side chain to form a lactam linkage
  MOD_RES 16: note = Lys is cyclized through side chain to form a lactam linkage
  MOD_RES 17: note = hArg
  MOD_RES 18: note = Lys(C20)
  MOD_RES 19..20: note = Aib
  REGION 1..20: note = C-term amide
HXQGTFTSDYSEYLDKRKXX

SEQ ID NO: 599 - protein, 20 aa, synthetic construct
  REGION 1..20: note = Description of Artificial Sequence: Synthetic peptide
  MOD_RES 2: note = Ac4c
  MOD_RES 12: note = Lys is cyclized through side chain to form a lactam linkage
  REGION 16..20: note = misc_feature - Cyclic
  MOD_RES 16: note = Glu is cyclized through side chain to form a lactam linkage
  MOD_RES 18: note = Lys(C12)
  MOD_RES 19..20: note = Aib
  REGION 1..20: note = C-term amide
HXQGTFTSDYSKYLDERKXX

SEQ ID NO: 600 - protein, 20 aa, synthetic construct
  REGION 1..20: note = Description of Artificial Sequence: Synthetic peptide
  MOD_RES 2: note = Ac4c
  MOD_RES 12: note = Lys is cyclized through side chain to form a lactam linkage
  REGION 16..20: note = misc_feature - Cyclic
  MOD_RES 16: note = Glu is cyclized through side chain to form a lactam linkage
  MOD_RES 18: note = Lys(C14)
  MOD_RES 19..20: note = Aib
  REGION 1..20: note = C-term amide
HXQGTFTSDYSKYLDERKXX

SEQ ID NO: 601 - protein, 20 aa, synthetic construct
  REGION 1..20: note = Description of Artificial Sequence: Synthetic peptide
  MOD_RES 2: note = Ac4c
  MOD_RES 12: note = Lys is cyclized through side chain to form a lactam linkage
  REGION 16..20: note = misc_feature - Cyclic
  MOD_RES 16: note = Glu is cyclized through side chain to form a lactam linkage
  MOD_RES 18: note = Lys(C16)
  MOD_RES 19..20: note = Aib
  REGION 1..20: note = C-term amide
HXQGTFTSDYSKYLDERKXX

SEQ ID NO: 602 - protein, 20 aa, synthetic construct
  REGION 1..20: note = Description of Artificial Sequence: Synthetic peptide
  MOD_RES 2: note = Ac4c
  MOD_RES 12: note = Lys is cyclized through side chain to form a lactam linkage
  REGION 16..20: note = misc_feature - Cyclic
  MOD_RES 16: note = Glu is cyclized through side chain to form a lactam linkage
  MOD_RES 18: note = Lys(C18)
  MOD_RES 19..20: note = Aib
  REGION 1..20: note = C-term amide
HXQGTFTSDYSKYLDERKXX

SEQ ID NO: 603 - protein, 20 aa, synthetic construct
  REGION 1..20: note = Description of Artificial Sequence: Synthetic peptide
  MOD_RES 2: note = Ac4c
  MOD_RES 12: note = Lys is cyclized through side chain to form a lactam linkage
  REGION 16..20: note = misc_feature - Cyclic
  MOD_RES 16: note = Glu is cyclized through side chain to form a lactam linkage
  MOD_RES 18: note = Lys(C20)
  MOD_RES 19..20: note = Aib
  REGION 1..20: note = C-term amide
HXQGTFTSDYSKYLDERKXX

SEQ ID NO: 604 - protein, 20 aa, synthetic construct
  REGION 1..20: note = Description of Artificial Sequence: Synthetic peptide
  MOD_RES 2: note = Ac4c
  MOD_RES 12: note = Lys is cyclized through side chain to form a lactam linkage
  REGION 16..20: note = misc_feature - Cyclic
  MOD_RES 16: note = Glu is cyclized through side chain to form a lactam linkage
  MOD_RES 17: note = hArg
  MOD_RES 18: note = Lys(C12)
  MOD_RES 19..20: note = Aib
  REGION 1..20: note = C-term amide
HXQGTFTSDYSKYLDERKXX

SEQ ID NO: 605 - protein, 20 aa, synthetic construct
  REGION 1..20: note = Description of Artificial Sequence: Synthetic peptide
  MOD_RES 2: note = Ac4c
  MOD_RES 12: note = Lys is cyclized through side chain to form a lactam linkage
  REGION 16..20: note = misc_feature - Cyclic
  MOD_RES 16: note = Glu is cyclized through side chain to form a lactam linkage
  MOD_RES 17: note = hArg
  MOD_RES 18: note = Lys(C14)
  MOD_RES 19..20: note = Aib
  REGION 1..20: note = C-term amide
HXQGTFTSDYSKYLDERKXX

SEQ ID NO: 606 - protein, 20 aa, synthetic construct
  REGION 1..20: note = Description of Artificial Sequence: Synthetic peptide
  MOD_RES 2: note = Ac4c
  MOD_RES 12: note = Lys is cyclized through side chain to form a lactam linkage
  REGION 16..20: note = misc_feature - Cyclic
  MOD_RES 16: note = Glu is cyclized through side chain to form a lactam linkage
  MOD_RES 17: note = hArg
  MOD_RES 18: note = Lys(C16)
  MOD_RES 19..20: note = Aib
  REGION 1..20: note = C-term amide
HXQGTFTSDYSKYLDERKXX

SEQ ID NO: 607 - protein, 20 aa, synthetic construct
  REGION 1..20: note = Description of Artificial Sequence: Synthetic peptide
  MOD_RES 2: note = Ac4c
  MOD_RES 12: note = Lys is cyclized through side chain to form a lactam linkage
  REGION 16..20: note = misc_feature - Cyclic
  MOD_RES 16: note = Glu is cyclized through side chain to form a lactam linkage
  MOD_RES 17: note = hArg
  MOD_RES 18: note = Lys(C18)
  MOD_RES 19..20: note = Aib
  REGION 1..20: note = C-term amide
HXQGTFTSDYSKYLDERKXX

SEQ ID NO: 608 - protein, 20 aa, synthetic construct
  REGION 1..20: note = Description of Artificial Sequence: Synthetic peptide
  MOD_RES 2: note = Ac4c
  MOD_RES 12: note = Lys is cyclized through side chain to form a lactam linkage
  REGION 16..20: note = misc_feature - Cyclic
  MOD_RES 16: note = Glu is cyclized through side chain to form a lactam linkage
  MOD_RES 17: note = hArg
  MOD_RES 18: note = Lys(C20)
  MOD_RES 19..20: note = Aib
  REGION 1..20: note = C-term amide
HXQGTFTSDYSKYLDERKXX

SEQ ID NO: 609 - protein, 20 aa, synthetic construct
  REGION 1..20: note = Description of Artificial Sequence: Synthetic peptide
  MOD_RES 2: note = Ac4c
  REGION 12..16: note = misc_feature - Cyclic
  MOD_RES 12: note = Glu is cyclized through side chain to form a lactam linkage
  MOD_RES 16: note = Lys is cyclized through side chain to form a lactam linkage
  MOD_RES 18: note = Lys(C12)
  MOD_RES 19..20: note = Aib
  REGION 1..20: note = C-term amide
HXQGTFTSDYSEYLDKRKXX

SEQ ID NO: 610 - protein, 20 aa, synthetic construct
  REGION 1..20: note = Description of Artificial Sequence: Synthetic peptide
  MOD_RES 2: note = Ac4c
  REGION 12..16: note = misc_feature - Cyclic
  MOD_RES 12: note = Glu is cyclized through side chain to form a lactam linkage
  MOD_RES 16: note = Lys is cyclized through side chain to form a lactam linkage
  MOD_RES 18: note = Lys(C14)
  MOD_RES 19..20: note = Aib
  REGION 1..20: note = C-term amide
HXQGTFTSDYSEYLDKRKXX

SEQ ID NO: 611 - protein, 20 aa, synthetic construct
  REGION 1..20: note = Description of Artificial Sequence: Synthetic peptide
  MOD_RES 2: note = Ac4c
  REGION 12..16: note = misc_feature - Cyclic
  MOD_RES 12: note = Glu is cyclized through side chain to form a lactam linkage
  MOD_RES 16: note = Lys is cyclized through side chain to form a lactam linkage
  MOD_RES 18: note = Lys(C16)
  MOD_RES 19..20: note = Aib
  REGION 1..20: note = C-term amide
HXQGTFTSDYSEYLDKRKXX

SEQ ID NO: 612 - protein, 20 aa, synthetic construct
  REGION 1..20: note = Description of Artificial Sequence: Synthetic peptide
  MOD_RES 2: note = Ac4c
  REGION 12..16: note = misc_feature - Cyclic
  MOD_RES 12: note = Glu is cyclized through side chain to form a lactam linkage
  MOD_RES 16: note = Lys is cyclized through side chain to form a lactam linkage
  MOD_RES 18: note = Lys(C18)
  MOD_RES 19..20: note = Aib
  REGION 1..20: note = C-term amide
HXQGTFTSDYSEYLDKRKXX

SEQ ID NO: 613 - protein, 20 aa, synthetic construct
  REGION 1..20: note = Description of Artificial Sequence: Synthetic peptide
  MOD_RES 2: note = Ac4c
  REGION 12..16: note = misc_feature - Cyclic
  MOD_RES 12: note = Glu is cyclized through side chain to form a lactam linkage
  MOD_RES 16: note = Lys is cyclized through side chain to form a lactam linkage
  MOD_RES 18: note = Lys(C20)
  MOD_RES 19..20: note = Aib
  REGION 1..20: note = C-term amide
HXQGTFTSDYSEYLDKRKXX

SEQ ID NO: 614 - protein, 20 aa, synthetic construct
  REGION 1..20: note = Description of Artificial Sequence: Synthetic peptide
  MOD_RES 2: note = Ac4c
  REGION 12..16: note = misc_feature - Cyclic
  MOD_RES 12: note = Glu is cyclized through side chain to form a lactam linkage
  MOD_RES 16: note = Lys is cyclized through side chain to form a lactam linkage
  MOD_RES 17: note = hArg
  MOD_RES 18: note = Lys(C12)
  MOD_RES 19..20: note = Aib
  REGION 1..20: note = C-term amide
HXQGTFTSDYSEYLDKRKXX

SEQ ID NO: 615 - protein, 20 aa, synthetic construct
  REGION 1..20: note = Description of Artificial Sequence: Synthetic peptide
  MOD_RES 2: note = Ac4c
  REGION 12..16: note = misc_feature - Cyclic
  MOD_RES 12: note = Glu is cyclized through side chain to form a lactam linkage
  MOD_RES 16: note = Lys is cyclized through side chain to form a lactam linkage
  MOD_RES 17: note = hArg
  MOD_RES 18: note = Lys(C14)
  MOD_RES 19..20: note = Aib
  REGION 1..20: note = C-term amide
HXQGTFTSDYSEYLDKRKXX

SEQ ID NO: 616 - protein, 20 aa, synthetic construct
  REGION 1..20: note = Description of Artificial Sequence: Synthetic peptide
  MOD_RES 2: note = Ac4c
  REGION 12..16: note = misc_feature - Cyclic
  MOD_RES 12: note = Glu is cyclized through side chain to form a lactam linkage
  MOD_RES 16: note = Lys is cyclized through side chain to form a lactam linkage
  MOD_RES 17: note = hArg
  MOD_RES 18: note = Lys(C16)
  MOD_RES 19..20: note = Aib
  REGION 1..20: note = C-term amide
HXQGTFTSDYSEYLDKRKXX

SEQ ID NO: 617 - protein, 20 aa, synthetic construct
  REGION 1..20: note = Description of Artificial Sequence: Synthetic peptide
  MOD_RES 2: note = Ac4c
  REGION 12..16: note = misc_feature - Cyclic
  MOD_RES 12: note = Glu is cyclized through side chain to form a lactam linkage
  MOD_RES 16: note = Lys is cyclized through side chain to form a lactam linkage
  MOD_RES 17: note = hArg
  MOD_RES 18: note = Lys(C18)
  MOD_RES 19..20: note = Aib
  REGION 1..20: note = C-term amide
HXQGTFTSDYSEYLDKRKXX

SEQ ID NO: 618 - protein, 20 aa, synthetic construct
  REGION 1..20: note = Description of Artificial Sequence: Synthetic peptide
  MOD_RES 2: note = Ac4c
  REGION 12..16: note = misc_feature - Cyclic
  MOD_RES 12: note = Glu is cyclized through side chain to form a lactam linkage
  MOD_RES 16: note = Lys is cyclized through side chain to form a lactam linkage
  MOD_RES 17: note = hArg
  MOD_RES 18: note = Lys(C20)
  MOD_RES 19..20: note = Aib
  REGION 1..20: note = C-term amide
HXQGTFTSDYSEYLDKRKXX

SEQ ID NO: 619 - protein, 19 aa, synthetic construct
  REGION 1..19: note = Description of Artificial Sequence: Synthetic peptide
  MOD_RES 2: note = Aib or Ac4c
  MOD_RES 16: note = Aib
  MOD_RES 17: note = Arg, hArg or Gln
  MOD_RES 18: note = Lys(N-omega-1'-alkyl beta-D-glucuronyl)
  MOD_RES 19: note = Aib, Ac4c or Ac5c
  REGION 1..19: note = C-term NH2
  REGION 1..19: note = see specification as filed for detailed description of substitutions and preferred embodiments
HXQGTFTSDYSKYLDXXKX

SEQ ID NO: 620 - protein, 20 aa, synthetic construct
  REGION 1..20: note = Description of Artificial Sequence: Synthetic peptide
  MOD_RES 2: note = Aib or Ac4c
  MOD_RES 16: note = Aib
  MOD_RES 17: note = Arg, hArg or Gln
  MOD_RES 18: note = Lys(N-omega-1'-alkyl beta-D-glucuronyl)
  MOD_RES 19..20: note = Aib, Ac4c or Ac5c
  REGION 1..20: note = C-term NH2
  REGION 1..20: note = see specification as filed for detailed description of substitutions and preferred embodiments
HXQGTFTSDYSKYLDXXKXX

SEQ ID NO: 621 - protein, 19 aa, synthetic construct
  REGION 1..19: note = Description of Artificial Sequence: Synthetic peptide
  MOD_RES 2: note = Aib or Ac4c
  MOD_RES 16: note = Aib or Ac4c
  MOD_RES 17: note = Arg, hArg or Gln
  MOD_RES 18: note = Lys(N-omega-1'-alkyl beta-D-glucuronyl)
  MOD_RES 19: note = Aib, Ac4c or Ac5c
  REGION 1..19: note = C-term NH2
  REGION 1..19: note = see specification as filed for detailed description of substitutions and preferred embodiments
HXQGTFTSDYSKYLDXXKX

SEQ ID NO: 622 - protein, 29 aa, synthetic construct
  REGION 1..29: note = Description of Artificial Sequence: Synthetic peptide
  MOD_RES 2: note = Aib or Ac4c
  REGION 16..20: note = misc_feature - Cyclic
  MOD_RES 16: note = Lys or Glu and are cyclized through their side chains to form a lactam linkage
  MOD_RES 17: note = Arg, hArg or Gln
  MOD_RES 20: note = Lys or Glu and are cyclized through their side chains to form a lactam linkage
  MOD_RES 24: note = Lys(N-omega-1'-alkyl beta-D-glucuronyl)
  MOD_RES 27: note = Met or Nle
  REGION 1..29: note = C-term NH2
  REGION 1..29: note = see specification as filed for detailed description of substitutions and preferred embodiments
HXQGTFTSDYSKYLDXXAAXEFIKWLXNT

SEQ ID NO: 623 - protein, 29 aa, synthetic construct
  REGION 1..29: note = Description of Artificial Sequence: Synthetic peptide
  MOD_RES 2: note = Aib or Ac4c
  REGION 16..20: note = misc_feature - Cyclic
  MOD_RES 16: note = Glu is cyclized through side chain to form a lactam linkage
  MOD_RES 20: note = Lys is cyclized through side chain to form a lactam linkage
  MOD_RES 24: note = Lys(N-omega-1'-alkyl beta-D-glucuronyl)
  MOD_RES 29: note = Thr, Aib, Ac4c or Ac5c
  REGION 1..29: note = C-term NH2
  REGION 1..29: note = see specification as filed for detailed description of substitutions and preferred embodiments
HXQGTFTSDYSKYLDEQAAKEFIKWLMNX

SEQ ID NO: 624 - protein, 20 aa, synthetic construct
  REGION 1..20: note = Description of Artificial Sequence: Synthetic peptide
  MOD_RES 2: note = Aib or Ac4c
  REGION 12..16: note = misc_feature - Cyclic
  MOD_RES 12: note = Lys or Glu and are cyclized through their side chains to form a lactam linkage
  MOD_RES 16: note = Lys or Glu and are cyclized through their side chains to form a lactam linkage
  MOD_RES 17: note = Arg or hArg
  MOD_RES 18: note = Lys(N-omega-1'-alkyl beta-D-glucuronyl)
  MOD_RES 19..20: note = Aib, Ac4c or Ac5c
  REGION 1..20: note = C-term NH2
  REGION 1..20: note = see specification as filed for detailed description of substitutions and preferred embodiments
HXQGTFTSDYSXYLDXXKXX

SEQ ID NO: 625 - protein, 20 aa, synthetic construct
  REGION 1..20: note = Description of Artificial Sequence: Synthetic peptide
  MOD_RES 2: note = Ac4c
  REGION 12..16: note = misc_feature - Cyclic
  MOD_RES 12: note = Glu is cyclized through side chain to form a lactam linkage
  MOD_RES 16: note = Lys is cyclized through side chain to form a lactam linkage
  MOD_RES 17: note = Arg or hArg
  MOD_RES 18: note = Lys(N-omega-1'-alkyl beta-D-glucuronyl)
  MOD_RES 19..20: note = Aib
  REGION 1..20: note = C-term NH2
  REGION 1..20: note = see specification as filed for detailed description of substitutions and preferred embodiments
HXQGTFTSDYSEYLDKXKXX

SEQ ID NO: 626 - protein, 20 aa, synthetic construct
  REGION 1..20: note = Description of Artificial Sequence: Synthetic peptide
  MOD_RES 2: note = Ser, Ala, Gly, Aib, Ac4c or Ac5c
  REGION 12..16: note = misc_feature - Cyclic
  MOD_RES 12: note = Lys or Glu and are cyclized through their side chains to form a lactam linkage
  MOD_RES 16: note = Lys or Glu and are cyclized through their side chains to form a lactam linkage
  MOD_RES 17: note = Arg or hArg
  MOD_RES 18: note = Lys(N-omega-1'-alkyl beta-D-glucuronyl)
  MOD_RES 19..20: note = Aib, Ac4c or Ac5c
  REGION 1..20: note = C-term NH2
  REGION 1..20: note = see specification as filed for detailed description of substitutions and preferred embodiments
HXQGTFTSDYSXYLDXXKXX

SEQ ID NO: 627 - protein, 19 aa, synthetic construct
  REGION 1..19: note = Description of Artificial Sequence: Synthetic peptide
  MOD_RES 2: note = Aib or Ac4c
  MOD_RES 6: note = Me2Phe, MePhe or Phe
  MOD_RES 17: note = Aib
  MOD_RES 18: note = Lys(N-omega-1'-dodecyl beta-D-glucuronyl)
  MOD_RES 19: note = Aib, Ac4c or Ac5c
  REGION 1..19: note = C-term NH2
  REGION 1..19: note = see specification as filed for detailed description of substitutions and preferred embodiments
HXQGTXTSDYSKYLDSXKX

SEQ ID NO: 628 - protein, 20 aa, synthetic construct
  REGION 1..20: note = Description of Artificial Sequence: Synthetic peptide
  MOD_RES 2: note = Aib or Ac4c
  MOD_RES 6: note = Me2Phe, MePhe or Phe
  MOD_RES 17: note = Arg or hArg
  MOD_RES 18: note = Lys(N-omega-1'-dodecyl beta-D-glucuronyl)
  MOD_RES 19..20: note = Aib, Ac4c or Ac5c
  REGION 1..20: note = C-term NH2
  REGION 1..20: note = see specification as filed for detailed description of substitutions and preferred embodiments
HXQGTXTSDYSKYLDSXKXX

SEQ ID NO: 629 - protein, 23 aa, synthetic construct
  REGION 1..23: note = Description of Artificial Sequence: Synthetic peptide
  MOD_RES 2: note = Aib
  REGION 16..20: note = misc_feature - Cyclic
  MOD_RES 16: note = Glu is cyclized through side chain to form a lactam linkage
  MOD_RES 20: note = Lys is cyclized through side chain to form a lactam linkage
  MOD_RES 21: note = Lys(N-omega-1'-alkyl beta-D-glucuronyl)
  MOD_RES 23: note = Aib, Ac4c or Ac5c
  REGION 1..23: note = C-term NH2
  REGION 1..23: note = see specification as filed for detailed description of substitutions and preferred embodiments
HXQGTFTSDYSKYLDERAAKKFX

SEQ ID NO: 630 - protein, 23 aa, synthetic construct
  REGION 1..23: note = Description of Artificial Sequence: Synthetic peptide
  MOD_RES 2: note = Aib or Ac4c
  MOD_RES 6: note = Me2Phe, MePhe or Phe
  MOD_RES 12: note = Lys, Glu, Ser or U(X); wherein "U(X)" is a natural or unnatural amino acid comprising a functional group covalently attached to the surfactant X
  REGION 16..20: note = misc_feature - Cyclic
  MOD_RES 16: note = Absent or Ser, Gly, Glu, Aib, Ac5c, Lys, Arg or U(X); wherein "U(X)" is a natural or unnatural amino acid comprising a functional group covalently attached to the surfactant X
  MOD_RES 17: note = Arg, hArg or Gln
  MOD_RES 18: note = Aib or Ala
  MOD_RES 20: note = Absent or Gln, Lys, Arg, Cit, Glu, Aib, Ac4c, Ac5c or U(X); wherein "U(X)" is a natural or unnatural amino acid comprising a functional group covalently attached to the surfactant X
  MOD_RES 21: note = Lys(N-omega-1'-alkyl beta-D-glucuronyl)
  MOD_RES 23: note = Aib, Ac4c or Ac5c
  REGION 1..23: note = C-term NH2
  REGION 1..23: note = see specification as filed for detailed description of substitutions and preferred embodiments
HXQGTXTSDYSXYLDXXXAXKFX

SEQ ID NO: 631 - protein, 20 aa, synthetic construct
  REGION 1..20: note = Description of Artificial Sequence: Synthetic peptide
  MOD_RES 2: note = Aib or Ac4c
  REGION 12..16: note = misc_feature - Cyclic
  MOD_RES 12: note = Lys or Glu and are cyclized through their side chains to form a lactam linkage
  MOD_RES 16: note = Lys or Glu and are cyclized through their side chains to form a lactam linkage
  MOD_RES 17: note = Arg or hArg
  MOD_RES 18: note = Lys(N-omega-1'-alkyl beta-D-glucuronyl)
  MOD_RES 19..20: note = Aib, Ac4c or Ac5c
  REGION 1..20: note = C-term NH2
  REGION 1..20: note = see specification as filed for detailed description of substitutions and preferred embodiments
HXQGTFTSDYSXYLDXXKXX

SEQ ID NO: 632 - protein, 29 aa, unidentified
  REGION 1..29: note = Description of Unknown: Glucagon peptide
HSQGTFTSDYSKYLDSRRAQDFVQWLMNT

SEQ ID NO: 633 - protein, 37 aa, unidentified
  REGION 1..37: note = Description of Unknown: Oxyntomodulin peptide
HSQGTFTSDYSKYLDSRRAQDFVQWLMNTKRNRNNIA

SEQ ID NO: 634 - protein, 30 aa, unidentified
  REGION 1..30: note = Description of Unknown: Glucagon-like peptide 1
HAEGTFTSDVSSYLEGQAAKEFIAWLVKGR

SEQ ID NO: 635 - skipped

SEQ ID NO: 636 - protein, 19 aa, synthetic construct
  REGION 1..19: note = Description of Artificial Sequence: Synthetic peptide
  MOD_RES 2: note = Aib
  MOD_RES 18: note = Lys(N-epsilon-dodecanoyl)
  MOD_RES 19: note = Aib
  REGION 1..19: note = C-term NH2
HXQGTFTSDYSKYLDSRKX

SEQ ID NO: 637 - protein, 19 aa, synthetic construct
  REGION 1..19: note = Description of Artificial Sequence: Synthetic peptide
  MOD_RES 2: note = Aib
  MOD_RES 18: note = Lys(N-epsilon-tetradecanoyl)
  MOD_RES 19: note = Ac4c
  REGION 1..19: note = C-term NH2
HXQGTFTSDYSKYLDSRKX

SEQ ID NO: 638 - protein, 19 aa, synthetic construct
  REGION 1..19: note = Description of Artificial Sequence: Synthetic peptide
  MOD_RES 2: note = Aib
  MOD_RES 18: note = Lys(N-epsilon-hexadecanoyl)
  MOD_RES 19: note = Aib
  REGION 1..19: note = C-term NH2
HXQGTFTSDYSKYLDSRKX

SEQ ID NO: 639 - protein, 18 aa, synthetic construct
  REGION 1..18: note = Description of Artificial Sequence: Synthetic peptide
  MOD_RES 2: note = Aib
  MOD_RES 16: note = Aib
  MOD_RES 18: note = Lys(N-epsilon-dodecanoyl)
  REGION 1..18: note = C-term NH2
HXQGTFTSDYSKYLDXRK

SEQ ID NO: 640 - protein, 18 aa, synthetic construct
  REGION 1..18: note = Description of Artificial Sequence: Synthetic peptide
  MOD_RES 2: note = Aib
  MOD_RES 16: note = Aib
  MOD_RES 18: note = Lys(N-epsilon-tetradecanoyl)
  REGION 1..18: note = C-term NH2
HXQGTFTSDYSKYLDXRK

SEQ ID NO: 641 - protein, 18 aa, synthetic construct
  REGION 1..18: note = Description of Artificial Sequence: Synthetic peptide
  MOD_RES 2: note = Aib
  MOD_RES 16: note = Aib
  MOD_RES 18: note = Lys(N-epsilon-hexadecanoyl)
  REGION 1..18: note = C-term NH2
HXQGTFTSDYSKYLDXRK

SEQ ID NO: 642 - protein, 19 aa, synthetic construct
  REGION 1..19: note = Description of Artificial Sequence: Synthetic peptide
  MOD_RES 2: note = Aib
  MOD_RES 18: note Lys(N-epsilon-(gamma-glutamyl)-N-alpha-tetradecanoyl))
  MOD_RES 19: note = Aib
  REGION 1..19: note = C-term NH2
HXQGTFTSDYSKYLDSRKX

SEQ ID NO: 643 - protein, 19 aa, synthetic construct
  REGION 1..19: note = Description of Artificial Sequence: Synthetic peptide
  MOD_RES 2: note = Aib
  MOD_RES 16: note = Aib
  MOD_RES 18: note = Cys(S-(3-(PEG4-aminoethylacetamide-Cholesterol)))
  MOD_RES 19: note = Aib
  REGION 1..19: note = C-term NH2
HXQGTFTSDYSKYLDXRCX

SEQ ID NO: 644 - protein, 18 aa, synthetic construct
  REGION 1..18: note = Description of Artificial Sequence: Synthetic peptide
  MOD_RES 2: note = Aib
  REGION 12..16: note = misc_feature - Cyclic
  MOD_RES 18: note = Cys(S-(3-(PEG4-aminoethylacetamide-Cholesterol)))
  REGION 1..18: note = C-term NH2
HXQGTFTSDYSEYLDKRC

SEQ ID NO: 645 - skipped

SEQ ID NO: 646 - protein, 20 aa, synthetic construct
  REGION 1..20: note = Description of Artificial Sequence: Synthetic peptide
  MOD_RES 2: note = Aib
  MOD_RES 16: note = Aib
  MOD_RES 18: note = Lys(C12)
  MOD_RES 19: note = Aib
  MOD_RES 20: note = Aib
  REGION 1..20: note = C-term amide
HXQGTFTSDYSKYLDXRKXX

SEQ ID NO: 647 - protein, 20 aa, synthetic construct
  REGION 1..20: note = Description of Artificial Sequence: Synthetic peptide
  MOD_RES 2: note = Aib
  MOD_RES 16: note = Aib
  MOD_RES 18: note = Lys(C14)
  MOD_RES 19: note = Aib
  MOD_RES 20: note = Aib
  REGION 1..20: note = C-term amide
HXQGTFTSDYSKYLDXRKXX

SEQ ID NO: 648 - protein, 20 aa, synthetic construct
  REGION 1..20: note = Description of Artificial Sequence: Synthetic peptide
  MOD_RES 2: note = Aib
  MOD_RES 16: note = Aib
  MOD_RES 18: note = Lys(C16)
  MOD_RES 19: note = Aib
  MOD_RES 20: note = Aib
  REGION 1..20: note = C-term amide
HXQGTFTSDYSKYLDXRKXX

SEQ ID NO: 649 - protein, 20 aa, synthetic construct
  REGION 1..20: note = Description of Artificial Sequence: Synthetic peptide
  MOD_RES 2: note = Aib
  MOD_RES 16: note = Aib
  MOD_RES 18: note = Lys(C18)
  MOD_RES 19: note = Aib
  MOD_RES 20: note = Aib
  REGION 1..20: note = C-term amide
HXQGTFTSDYSKYLDXRKXX

SEQ ID NO: 650 - protein, 20 aa, synthetic construct
  REGION 1..20: note = Description of Artificial Sequence: Synthetic peptide
  MOD_RES 2: note = Aib
  MOD_RES 16: note = Aib
  MOD_RES 18: note = Lys(C20)
  MOD_RES 19: note = Aib
  MOD_RES 20: note = Aib
  REGION 1..20: note = C-term amide
HXQGTFTSDYSKYLDXRKXX

SEQ ID NO: 651 - protein, 20 aa, synthetic construct
  REGION 1..20: note = Description of Artificial Sequence: Synthetic peptide
  MOD_RES 2: note = Aib
  MOD_RES 16: note = Aib
  MOD_RES 17: note = hArg
  MOD_RES 18: note = Lys(C12)
  MOD_RES 19: note = Aib
  MOD_RES 20: note = Aib
  REGION 1..20: note = C-term amide
HXQGTFTSDYSKYLDXRKXX

SEQ ID NO: 652 - protein, 20 aa, synthetic construct
  REGION 1..20: note = Description of Artificial Sequence: Synthetic peptide
  MOD_RES 2: note = Aib
  MOD_RES 16: note = Aib
  MOD_RES 17: note = hArg
  MOD_RES 18: note = Lys(C14)
  MOD_RES 19: note = Aib
  MOD_RES 20: note = Aib
  REGION 1..20: note = C-term amide
HXQGTFTSDYSKYLDXRKXX

SEQ ID NO: 653 - protein, 20 aa, synthetic construct
  REGION 1..20: note = Description of Artificial Sequence: Synthetic peptide
  MOD_RES 2: note = Aib
  MOD_RES 16: note = Aib
  MOD_RES 17: note = hArg
  MOD_RES 18: note = Lys(C16)
  MOD_RES 19: note = Aib
  MOD_RES 20: note = Aib
  REGION 1..20: note = C-term amide
HXQGTFTSDYSKYLDXRKXX

SEQ ID NO: 654 - protein, 20 aa, synthetic construct
  REGION 1..20: note = Description of Artificial Sequence: Synthetic peptide
  MOD_RES 2: note = Aib
  MOD_RES 16: note = Aib
  MOD_RES 17: note = hArg
  MOD_RES 18: note = Lys(C18)
  MOD_RES 19: note = Aib
  MOD_RES 20: note = Aib
  REGION 1..20: note = C-term amide
HXQGTFTSDYSKYLDXRKXX

SEQ ID NO: 655 - protein, 20 aa, synthetic construct
  REGION 1..20: note = Description of Artificial Sequence: Synthetic peptide
  MOD_RES 2: note = Aib
  MOD_RES 16: note = Aib
  MOD_RES 17: note = hArg
  MOD_RES 18: note = Lys(C20)
  MOD_RES 19: note = Aib
  MOD_RES 20: note = Aib
  REGION 1..20: note = C-term amide
HXQGTFTSDYSKYLDXRKXX

SEQ ID NO: 656 - protein, 19 aa, synthetic construct
  REGION 1..19: note = Description of Artificial Sequence: Synthetic peptide
  MOD_RES 2: note = Aib
  MOD_RES 16: note = Aib
  MOD_RES 18: note = Lys(C12)
  MOD_RES 19: note = Aib
  REGION 1..19: note = C-term amide
HXQGTFTSDYSKYLDXRKX

SEQ ID NO: 657 - protein, 19 aa, synthetic construct
  REGION 1..19: note = Description of Artificial Sequence: Synthetic peptide
  MOD_RES 2: note = Aib
  MOD_RES 16: note = Aib
  MOD_RES 18: note = Lys(C14)
  MOD_RES 19: note = Aib
  REGION 1..19: note = C-term amide
HXQGTFTSDYSKYLDXRKX

SEQ ID NO: 658 - protein, 19 aa, synthetic construct
  REGION 1..19: note = Description of Artificial Sequence: Synthetic peptide
  MOD_RES 2: note = Aib
  MOD_RES 16: note = Aib
  MOD_RES 18: note = Lys(C16)
  MOD_RES 19: note = Aib
  REGION 1..19: note = C-term amide
HXQGTFTSDYSKYLDXRKX

SEQ ID NO: 659 - protein, 19 aa, synthetic construct
  REGION 1..19: note = Description of Artificial Sequence: Synthetic peptide
  MOD_RES 2: note = Aib
  MOD_RES 16: note = Aib
  MOD_RES 18: note = Lys(C18)
  MOD_RES 19: note = Aib
  REGION 1..19: note = C-term amide
HXQGTFTSDYSKYLDXRKX

SEQ ID NO: 660 - protein, 19 aa, synthetic construct
  REGION 1..19: note = Description of Artificial Sequence: Synthetic peptide
  MOD_RES 2: note = Aib
  MOD_RES 16: note = Aib
  MOD_RES 18: note = Lys(C20)
  MOD_RES 19: note = Aib
  REGION 1..19: note = C-term amide
HXQGTFTSDYSKYLDXRKX

SEQ ID NO: 661 - protein, 19 aa, synthetic construct
  REGION 1..19: note = Description of Artificial Sequence: Synthetic peptide
  MOD_RES 2: note = Aib
  MOD_RES 16: note = Aib
  MOD_RES 17: note = hArg
  MOD_RES 18: note = Lys(C12)
  MOD_RES 19: note = Aib
  REGION 1..19: note = C-term amide
HXQGTFTSDYSKYLDXRKX

SEQ ID NO: 662 - protein, 19 aa, synthetic construct
  REGION 1..19: note = Description of Artificial Sequence: Synthetic peptide
  MOD_RES 2: note = Aib
  MOD_RES 16: note = Aib
  MOD_RES 17: note = hArg
  MOD_RES 18: note = Lys(C14)
  MOD_RES 19: note = Aib
  REGION 1..19: note = C-term amide
HXQGTFTSDYSKYLDXRKX

SEQ ID NO: 663 - protein, 19 aa, synthetic construct
  REGION 1..19: note = Description of Artificial Sequence: Synthetic peptide
  MOD_RES 2: note = Aib
  MOD_RES 16: note = Aib
  MOD_RES 17: note = hArg
  MOD_RES 18: note = Lys(C16)
  MOD_RES 19: note = Aib
  REGION 1..19: note = C-term amide
HXQGTFTSDYSKYLDXRKX

SEQ ID NO: 664 - protein, 19 aa, synthetic construct
  REGION 1..19: note = Description of Artificial Sequence: Synthetic peptide
  MOD_RES 2: note = Aib
  MOD_RES 16: note = Aib
  MOD_RES 17: note = hArg
  MOD_RES 18: note = Lys(C18)
  MOD_RES 19: note = Aib
  REGION 1..19: note = C-term amide
HXQGTFTSDYSKYLDXRKX

SEQ ID NO: 665 - protein, 19 aa, synthetic construct
  REGION 1..19: note = Description of Artificial Sequence: Synthetic peptide
  MOD_RES 2: note = Aib
  MOD_RES 16: note = Aib
  MOD_RES 17: note = hArg
  MOD_RES 18: note = Lys(C20)
  MOD_RES 19: note = Aib
  REGION 1..19: note = C-term amide
HXQGTFTSDYSKYLDXRKX

SEQ ID NO: 666 - protein, 19 aa, synthetic construct
  REGION 1..19: note = Description of Artificial Sequence: Synthetic peptide
  MOD_RES 2: note = Ac3c
  MOD_RES 16: note = Aib
  MOD_RES 17: note = hArg
  MOD_RES 18: note = Lys(C12)
  MOD_RES 19: note = Aib
  REGION 1..19: note = C-term amide
HXQGTFTSDYSKYLDXRKX

SEQ ID NO: 667 - protein, 18 aa, synthetic construct
  REGION 1..18: note = Description of Artificial Sequence: Synthetic peptide
  MOD_RES 2: note = Aib
  MOD_RES 18: note = Lys(C12)
  REGION 1..18: note = C-term amide
HXQGTFTSDYSKYLDSRK

SEQ ID NO: 668 - protein, 18 aa, synthetic construct
  REGION 1..18: note = Description of Artificial Sequence: Synthetic peptide
  MOD_RES 2: note = Aib
  MOD_RES 17: note = hArg
  MOD_RES 18: note = Lys(C12)
  REGION 1..18: note = C-term amide
HXQGTFTSDYSKYLDSRK

SEQ ID NO: 669 - protein, 18 aa, synthetic construct
  REGION 1..18: note = Description of Artificial Sequence: Synthetic peptide
  MOD_RES 2: note = Aib
  MOD_RES 16: note = Aib
  MOD_RES 18: note = Lys(C12)
  REGION 1..18: note = C-term amide
HXQGTFTSDYSKYLDXRK

SEQ ID NO: 670 - protein, 18 aa, synthetic construct
  REGION 1..18: note = Description of Artificial Sequence: Synthetic peptide
  MOD_RES 2: note = Aib
  MOD_RES 16: note = Aib
  MOD_RES 17: note = hArg
  MOD_RES 18: note = Lys(C12)
  REGION 1..18: note = C-term amide
HXQGTFTSDYSKYLDXRK

SEQ ID NO: 671 - protein, 18 aa, synthetic construct
  REGION 1..18: note = Description of Artificial Sequence: Synthetic peptide
  MOD_RES 2: note = Ac4c
  MOD_RES 16: note = Aib
  MOD_RES 18: note = Lys(C12)
  REGION 1..18: note = C-term amide
HXQGTFTSDYSKYLDXRK

SEQ ID NO: 672 - protein, 19 aa, synthetic construct
  REGION 1..19: note = Description of Artificial Sequence: Synthetic peptide
  MOD_RES 2: note = Ac4c
  MOD_RES 16: note = Aib
  MOD_RES 18: note = Lys(C12)
  MOD_RES 19: note = Aib
  REGION 1..19: note = C-term amide
HXQGTFTSDYSKYLDXRKX

SEQ ID NO: 673 - protein, 18 aa, synthetic construct
  REGION 1..18: note = Description of Artificial Sequence: Synthetic peptide
  MOD_RES 2: note = Ac4c
  MOD_RES 16: note = Aib
  MOD_RES 17: note = hArg
  MOD_RES 18: note = Lys(C12)
  REGION 1..18: note = C-term amide
HXQGTFTSDYSKYLDXRK

SEQ ID NO: 674 - protein, 18 aa, synthetic construct
  REGION 1..18: note = Description of Artificial Sequence: Synthetic peptide
  MOD_RES 2: note = Ac4c
  MOD_RES 16: note = Aib
  MOD_RES 17: note = hArg
  MOD_RES 18: note = Lys(C14)
  REGION 1..18: note = C-term amide
HXQGTFTSDYSKYLDXRK

SEQ ID NO: 675 - protein, 18 aa, synthetic construct
  REGION 1..18: note = Description of Artificial Sequence: Synthetic peptide
  MOD_RES 2: note = Ac4c
  MOD_RES 16: note = Aib
  MOD_RES 17: note = hArg
  MOD_RES 18: note = Lys(C16)
  REGION 1..18: note = C-term amide
HXQGTFTSDYSKYLDXRK

SEQ ID NO: 676 - protein, 18 aa, synthetic construct
  REGION 1..18: note = Description of Artificial Sequence: Synthetic peptide
  MOD_RES 2: note = Ac4c
  MOD_RES 16: note = Aib
  MOD_RES 17: note = hArg
  MOD_RES 18: note = Lys(C18)
  REGION 1..18: note = C-term amide
HXQGTFTSDYSKYLDXRK

SEQ ID NO: 677 - protein, 18 aa, synthetic construct
  REGION 1..18: note = Description of Artificial Sequence: Synthetic peptide
  MOD_RES 2: note = Aib
  REGION 10..14: note = misc_feature - Cyclic
  MOD_RES 10: note = Glu is cyclized through side chain to form a lactam linkage
  MOD_RES 14: note = Lys is cyclized through side chain to form a lactam linkage
  MOD_RES 18: note = Lys(C12)
  REGION 1..18: note = C-term amide
HXQGTFTSDESKYKDSRK

SEQ ID NO: 678 - protein, 18 aa, synthetic construct
  REGION 1..18: note = Description of Artificial Sequence: Synthetic peptide
  MOD_RES 2: note = Ac4c
  REGION 10..14: note = misc_feature - Cyclic
  MOD_RES 10: note = Glu is cyclized through side chain to form a lactam linkage
  MOD_RES 14: note = Lys is cyclized through side chain to form a lactam linkage
  MOD_RES 16: note = Aib
  MOD_RES 17: note = hArg
  MOD_RES 18: note = Lys(C14)
  REGION 1..18: note = C-term amide
HXQGTFTSDESKYKDXRK

SEQ ID NO: 679 - protein, 18 aa, synthetic construct
  REGION 1..18: note = Description of Artificial Sequence: Synthetic peptide
  MOD_RES 2: note = Aib
  REGION 13..17: note = misc_feature - Cyclic
  MOD_RES 13: note = Glu is cyclized through side chain to form a lactam linkage
  MOD_RES 17: note = Lys is cyclized through side chain to form a lactam linkage
  MOD_RES 18: note = Lys(C12)
  REGION 1..18: note = C-term amide
HXQGTFTSDYSKELDSKK

SEQ ID NO: 680 - protein, 20 aa, synthetic construct
  REGION 1..20: note = Description of Artificial Sequence: Synthetic peptide
  MOD_RES 2: note = Aib
  REGION 17..20: note = misc_feature - Cyclic
  MOD_RES 17: note = Glu is cyclized through side chain to form a lactam linkage
  MOD_RES 18: note = Lys(C12)
  MOD_RES 20: note = Lys is cyclized through side chain to form a lactam linkage
  REGION 1..20: note = C-term amide
HXQGTFTSDYSKYLDSEKAK

SEQ ID NO: 681 - protein, 21 aa, synthetic construct
  REGION 1..21: note = Description of Artificial Sequence: Synthetic peptide
  MOD_RES 2: note = Aib
  REGION 17..21: note = misc_feature - Cyclic
  MOD_RES 17: note = Glu is cyclized through side chain to form a lactam linkage
  MOD_RES 18: note = Lys(C12)
  MOD_RES 21: note = Lys is cyclized through side chain to form a lactam linkage
  REGION 1..21: note = C-term amide
HXQGTFTSDYSKYLDSEKARK

SEQ ID NO: 682 - protein, 21 aa, synthetic construct
  REGION 1..21: note = Description of Artificial Sequence: Synthetic peptide
  MOD_RES 2: note = Aib
  REGION 17..21: note = misc_feature - Cyclic
  MOD_RES 17: note = Glu is cyclized through side chain to form a lactam linkage
  MOD_RES 18: note = Lys(C14)
  MOD_RES 21: note = Lys is cyclized through side chain to form a lactam linkage
  REGION 1..21: note = C-term amide
HXQGTFTSDYSKYLDSEKARK

SEQ ID NO: 683 - protein, 21 aa, synthetic construct
  REGION 1..21: note = Description of Artificial Sequence: Synthetic peptide
  MOD_RES 2: note = Aib
  REGION 17..21: note = misc_feature - Cyclic
  MOD_RES 17: note = Glu is cyclized through side chain to form a lactam linkage
  MOD_RES 18: note = Lys(C16)
  MOD_RES 21: note = Lys is cyclized through side chain to form a lactam linkage
  REGION 1..21: note = C-term amide
HXQGTFTSDYSKYLDSEKARK

SEQ ID NO: 684 - protein, 21 aa, synthetic construct
  REGION 1..21: note = Description of Artificial Sequence: Synthetic peptide
  MOD_RES 2: note = Aib
  REGION 17..21: note = misc_feature - Cyclic
  MOD_RES 17: note = Glu is cyclized through side chain to form a lactam linkage
  MOD_RES 18: note = Lys(C18)
  MOD_RES 21: note = Lys is cyclized through side chain to form a lactam linkage
  REGION 1..21: note = C-term amide
HXQGTFTSDYSKYLDSEKARK

SEQ ID NO: 685 - protein, 21 aa, synthetic construct
  REGION 1..21: note = Description of Artificial Sequence: Synthetic peptide
  MOD_RES 2: note = Aib
  REGION 17..21: note = misc_feature - Cyclic
  MOD_RES 17: note = Glu is cyclized through side chain to form a lactam linkage
  MOD_RES 18: note = Lys(C20)
  MOD_RES 21: note = Lys is cyclized through side chain to form a lactam linkage
  REGION 1..21: note = C-term amide
HXQGTFTSDYSKYLDSEKARK

SEQ ID NO: 686 - protein, 21 aa, synthetic construct
  REGION 1..21: note = Description of Artificial Sequence: Synthetic peptide
  MOD_RES 2: note = Aib
  REGION 17..21: note = misc_feature - Cyclic
  MOD_RES 17: note = Glu is cyclized through side chain to form a lactam linkage
  MOD_RES 18: note = Lys(C12)
  MOD_RES 21: note = Lys is cyclized through side chain to form a lactam linkage
  REGION 1..21: note = C-term amide
HXQGTFTSDYSKYLDSEKAQK

SEQ ID NO: 687 - protein, 21 aa, synthetic construct
  REGION 1..21: note = Description of Artificial Sequence: Synthetic peptide
  MOD_RES 2: note = Aib
  REGION 17..21: note = misc_feature - Cyclic
  MOD_RES 17: note = Glu is cyclized through side chain to form a lactam linkage
  MOD_RES 18: note = Lys(C14)
  MOD_RES 21: note = Lys is cyclized through side chain to form a lactam linkage
  REGION 1..21: note = C-term amide
HXQGTFTSDYSKYLDSEKAQK

SEQ ID NO: 688 - protein, 21 aa, synthetic construct
  REGION 1..21: note = Description of Artificial Sequence: Synthetic peptide
  MOD_RES 2: note = Aib
  REGION 17..21: note = misc_feature - Cyclic
  MOD_RES 17: note = Glu is cyclized through side chain to form a lactam linkage
  MOD_RES 18: note = Lys(C16)
  MOD_RES 21: note = Lys is cyclized through side chain to form a lactam linkage
  REGION 1..21: note = C-term amide
HXQGTFTSDYSKYLDSEKAQK

SEQ ID NO: 689 - protein, 21 aa, synthetic construct
  REGION 1..21: note = Description of Artificial Sequence: Synthetic peptide
  MOD_RES 2: note = Aib
  REGION 17..21: note = misc_feature - Cyclic
  MOD_RES 17: note = Glu is cyclized through side chain to form a lactam linkage
  MOD_RES 18: note = Lys(C18)
  MOD_RES 21: note = Lys is cyclized through side chain to form a lactam linkage
  REGION 1..21: note = C-term amide
HXQGTFTSDYSKYLDSEKAQK

SEQ ID NO: 690 - protein, 21 aa, synthetic construct
  REGION 1..21: note = Description of Artificial Sequence: Synthetic peptide
  MOD_RES 2: note = Aib
  REGION 17..21: note = misc_feature - Cyclic
  MOD_RES 17: note = Glu is cyclized through side chain to form a lactam linkage
  MOD_RES 18: note = Lys(C20)
  MOD_RES 21: note = Lys is cyclized through side chain to form a lactam linkage
  REGION 1..21: note = C-term amide
HXQGTFTSDYSKYLDSEKAQK

SEQ ID NO: 691 - protein, 21 aa, synthetic construct
  REGION 1..21: note = Description of Artificial Sequence: Synthetic peptide
  MOD_RES 2: note = Aib
  REGION 17..21: note = misc_feature - Cyclic
  MOD_RES 17: note = Glu is cyclized through side chain to form a lactam linkage
  MOD_RES 18: note = Lys(C12)
  MOD_RES 21: note = Lys is cyclized through side chain to form a lactam linkage
  REGION 1..21: note = C-term amide
HXQGTFTSDYSKYLDSEKVRK

SEQ ID NO: 692 - protein, 11 aa, synthetic construct
  REGION 1..11: note = Description of Artificial Sequence: Synthetic peptide
  MOD_RES 2: note = Aib
  MOD_RES 6: note = Alpha-MeF
  MOD_RES 11: note = Lys(C8)
  REGION 1..11: note = C-term amide
HXQGTFTSDYK

SEQ ID NO: 693 - protein, 11 aa, synthetic construct
  REGION 1..11: note = Description of Artificial Sequence: Synthetic peptide
  MOD_RES 2: note = Aib
  MOD_RES 6: note = Alpha-MeF
  MOD_RES 11: note = Lys(C14)
  REGION 1..11: note = C-term amide
HXQGTFTSDYK

SEQ ID NO: 694 - protein, 11 aa, synthetic construct
  REGION 1..11: note = Description of Artificial Sequence: Synthetic peptide
  MOD_RES 2: note = Aib
  MOD_RES 6: note = Alpha-MeF
  MOD_RES 11: note = Lys(C16)
  REGION 1..11: note = C-term amide
HXQGTFTSDYK

SEQ ID NO: 695 - protein, 11 aa, synthetic construct
  REGION 1..11: note = Description of Artificial Sequence: Synthetic peptide
  MOD_RES 2: note = Aib
  MOD_RES 6: note = Alpha-MeF
  MOD_RES 11: note = Lys(C20)
  REGION 1..11: note = C-term amide
HXQGTFTSDYK

SEQ ID NO: 696 - protein, 11 aa, synthetic construct
  REGION 1..11: note = Description of Artificial Sequence: Synthetic peptide
  MOD_RES 2: note = Aib
  MOD_RES 11: note = Lys(C12)
  REGION 1..11: note = C-term amide
HXQGTFTSDYK

SEQ ID NO: 697 - protein, 11 aa, synthetic construct
  REGION 1..11: note = Description of Artificial Sequence: Synthetic peptide
  MOD_RES 2: note = Aib
  MOD_RES 6: note = Alpha-MeF
  MOD_RES 11: note = Lys(C12)
  REGION 1..11: note = C-term amide
HXQGTFTSDYK

SEQ ID NO: 698 - protein, 11 aa, synthetic construct
  REGION 1..11: note = Description of Artificial Sequence: Synthetic peptide
  MOD_RES 2: note = Aib
  MOD_RES 6: note = Alpha-MeF
  MOD_RES 11: note = Lys(C18)
  REGION 1..11: note = C-term amide
HXQGTFTSDYK

SEQ ID NO: 699 - protein, 11 aa, synthetic construct
  REGION 1..11: note = Description of Artificial Sequence: Synthetic peptide
  MOD_RES 2: note = Alpha-MePro
  MOD_RES 11: note = Lys(C12)
  REGION 1..11: note = C-term amide
HPQGTFTSDYK

SEQ ID NO: 700 - protein, 11 aa, synthetic construct
  REGION 1..11: note = Description of Artificial Sequence: Synthetic peptide
  MOD_RES 2: note = Alpha-MePro
  MOD_RES 6: note = Alpha-MeF
  MOD_RES 11: note = Lys(C12)
  REGION 1..11: note = C-term amide
HPQGTFTSDYK

SEQ ID NO: 701 - protein, 11 aa, synthetic construct
  REGION 1..11: note = Description of Artificial Sequence: Synthetic peptide
  MOD_RES 2: note = Alpha-MePro
  MOD_RES 6: note = Alpha-MeF
  MOD_RES 10: note = Bip
  MOD_RES 11: note = Lys(C12)
  REGION 1..11: note = C-term amide
HPQGTFTSDXK

SEQ ID NO: 702 - protein, 11 aa, synthetic construct
  REGION 1..11: note = Description of Artificial Sequence: Synthetic peptide
  MOD_RES 2: note = Aib
  MOD_RES 10: note = Bip
  MOD_RES 11: note = Lys(C12)
  REGION 1..11: note = C-term amide
HXQGTFTSDXK

SEQ ID NO: 703 - protein, 11 aa, synthetic construct
  REGION 1..11: note = Description of Artificial Sequence: Synthetic peptide
  MOD_RES 2: note = Aib
  MOD_RES 6: note = Alpha-MeF
  MOD_RES 10: note = Bip
  MOD_RES 11: note = Lys(C18)
  REGION 1..11: note = C-term amide
HXQGTFTSDXK

SEQ ID NO: 704 - protein, 11 aa, synthetic construct
  REGION 1..11: note = Description of Artificial Sequence: Synthetic peptide
  MOD_RES 2: note = Alpha-MePro
  MOD_RES 6: note = Alpha-MeF
  MOD_RES 11: note = Lys(C8)
  REGION 1..11: note = C-term amide
HPQGTFTSDYK

SEQ ID NO: 705 - protein, 11 aa, synthetic construct
  REGION 1..11: note = Description of Artificial Sequence: Synthetic peptide
  MOD_RES 2: note = Alpha-MePro
  MOD_RES 6: note = Alpha-MeF
  MOD_RES 11: note = Lys(16)
  REGION 1..11: note = C-term amide
HPQGTFTSDYK

SEQ ID NO: 706 - protein, 29 aa, synthetic construct
  REGION 1..29: note = Description of Artificial Sequence: Synthetic peptide
  MOD_RES 17: note = Lys(C8)
  REGION 1..29: note = C-term amide
HGQGTFTSDYSKYLDEKAAREFIAWLLNT

SEQ ID NO: 707 - protein, 29 aa, synthetic construct
  REGION 1..29: note = Description of Artificial Sequence: Synthetic peptide
  MOD_RES 17: note = Lys(C12)
  REGION 1..29: note = C-term amide
HGQGTFTSDYSKYLDEKAAREFIAWLLNT

SEQ ID NO: 708 - protein, 29 aa, synthetic construct
  REGION 1..29: note = Description of Artificial Sequence: Synthetic peptide
  MOD_RES 17: note = Lys(C14)
  REGION 1..29: note = C-term amide
HGQGTFTSDYSKYLDEKAAREFIAWLLNT

SEQ ID NO: 709 - protein, 29 aa, synthetic construct
  REGION 1..29: note = Description of Artificial Sequence: Synthetic peptide
  MOD_RES 17: note = Lys(C16)
  REGION 1..29: note = C-term amide
HGQGTFTSDYSKYLDEKAAREFIAWLLNT

SEQ ID NO: 710 - protein, 29 aa, synthetic construct
  REGION 1..29: note = Description of Artificial Sequence: Synthetic peptide
  MOD_RES 17: note = Lys(C18)
  REGION 1..29: note = C-term amide
HGQGTFTSDYSKYLDEKAAREFIAWLLNT

SEQ ID NO: 711 - protein, 29 aa, synthetic construct
  REGION 1..29: note = Description of Artificial Sequence: Synthetic peptide
  MOD_RES 17: note = Lys(C20)
  REGION 1..29: note = C-term amide
HGQGTFTSDYSKYLDEKAAREFIAWLLNT

SEQ ID NO: 712 - protein, 29 aa, synthetic construct
  REGION 1..29: note = Description of Artificial Sequence: Synthetic peptide
  MOD_RES 17: note = Lys(C8)
  REGION 1..29: note = C-term amide
HGQGTFTSDYSKYLDEKAAKEFIAWLLNT

SEQ ID NO: 713 - protein, 29 aa, synthetic construct
  REGION 1..29: note = Description of Artificial Sequence: Synthetic peptide
  MOD_RES 17: note = Lys(C14)
  REGION 1..29: note = C-term amide
HGQGTFTSDYSKYLDEKAAKEFIAWLLNT

SEQ ID NO: 714 - protein, 29 aa, synthetic construct
  REGION 1..29: note = Description of Artificial Sequence: Synthetic peptide
  MOD_RES 17: note = Lys(C16)
  REGION 1..29: note = C-term amide
HGQGTFTSDYSKYLDEKAAKEFIAWLLNT

SEQ ID NO: 715 - protein, 29 aa, synthetic construct
  REGION 1..29: note = Description of Artificial Sequence: Synthetic peptide
  MOD_RES 17: note = Lys(C20)
  REGION 1..29: note = C-term amide
HGQGTFTSDYSKYLDEKAAKEFIAWLLNT

SEQ ID NO: 716 - protein, 29 aa, synthetic construct
  REGION 1..29: note = Description of Artificial Sequence: Synthetic peptide
  REGION 1..29: note = C-term amide
HGQGTFTSDYSKYLDEKAAKEFIAWLLNT

SEQ ID NO: 717 - protein, 29 aa, synthetic construct
  REGION 1..29: note = Description of Artificial Sequence: Synthetic peptide
  MOD_RES 17: note = Lys(C12)
  REGION 1..29: note = C-term amide
HGQGTFTSDYSKYLDEKAAKEFIAWLLNT

SEQ ID NO: 718 - protein, 29 aa, synthetic construct
  REGION 1..29: note = Description of Artificial Sequence: Synthetic peptide
  MOD_RES 17: note = Lys(C18)
  REGION 1..29: note = C-term amide
HGQGTFTSDYSKYLDEKAAKEFIAWLLNT

SEQ ID NO: 719 - protein, 29 aa, synthetic construct
  REGION 1..29: note = Description of Artificial Sequence: Synthetic peptide
  MOD_RES 2: note = Aib
  MOD_RES 17: note = Lys(C18)
  REGION 1..29: note = C-term amide
HXQGTFTSDYSKYLDEKAAKEFIAWLLNT

SEQ ID NO: 720 - protein, 29 aa, synthetic construct
  REGION 1..29: note = Description of Artificial Sequence: Synthetic peptide
  REGION 1..29: note = C-term amide
HGQGTFTSDYSKYLDERRAKDFVQWLLNT

SEQ ID NO: 721 - protein, 29 aa, synthetic construct
  REGION 1..29: note = Description of Artificial Sequence: Synthetic peptide
  MOD_RES 20: note = Lys(C12)
  REGION 1..29: note = C-term amide
HGQGTFTSDYSKYLDERRAKDFVQWLLNT

SEQ ID NO: 722 - protein, 29 aa, synthetic construct
  REGION 1..29: note = Description of Artificial Sequence: Synthetic peptide
  MOD_RES 20: note = Lys(C18)
  REGION 1..29: note = C-term amide
HGQGTFTSDYSKYLDERRAKDFVQWLLNT

SEQ ID NO: 723 - protein, 29 aa, synthetic construct
  REGION 1..29: note = Description of Artificial Sequence: Synthetic peptide
  MOD_RES 2: note = Aib
  MOD_RES 20: note = Lys(C18)
  REGION 1..29: note = C-term amide
HXQGTFTSDYSKYLDERRAKDFVQWLLNT

SEQ ID NO: 724 - protein, 29 aa, synthetic construct
  REGION 1..29: note = Description of Artificial Sequence: Synthetic peptide
  MOD_RES 2: note = Aib
  MOD_RES 20: note = Lys(C8)
  REGION 1..29: note = C-term amide
HXQGTFTSDYSKYLDERRAKDFVQWLLNT

SEQ ID NO: 725 - protein, 29 aa, synthetic construct
  REGION 1..29: note = Description of Artificial Sequence: Synthetic peptide
  MOD_RES 2: note = Aib
  MOD_RES 20: note = Lys(C12)
  REGION 1..29: note = C-term amide
HXQGTFTSDYSKYLDERRAKDFVQWLLNT

SEQ ID NO: 726 - protein, 29 aa, synthetic construct
  REGION 1..29: note = Description of Artificial Sequence: Synthetic peptide
  MOD_RES 2: note = Aib
  MOD_RES 20: note = Lys(C14)
  REGION 1..29: note = C-term amide
HXQGTFTSDYSKYLDERRAKDFVQWLLNT

SEQ ID NO: 727 - protein, 29 aa, synthetic construct
  REGION 1..29: note = Description of Artificial Sequence: Synthetic peptide
  MOD_RES 2: note = Aib
  MOD_RES 20: note = Lys(C16)
  REGION 1..29: note = C-term amide
HXQGTFTSDYSKYLDERRAKDFVQWLLNT

SEQ ID NO: 728 - protein, 29 aa, synthetic construct
  REGION 1..29: note = Description of Artificial Sequence: Synthetic peptide
  MOD_RES 2: note = Aib
  MOD_RES 20: note = Lys(C18)
  REGION 1..29: note = C-term amide
HXQGTFTSDYSKYLDERRAKDFVQWLLNT

SEQ ID NO: 729 - protein, 29 aa, synthetic construct
  REGION 1..29: note = Description of Artificial Sequence: Synthetic peptide
  MOD_RES 2: note = Aib
  MOD_RES 20: note = Lys(C20)
  REGION 1..29: note = C-term amide
HXQGTFTSDYSKYLDERRAKDFVQWLLNT

SEQ ID NO: 730 - protein, 29 aa, synthetic construct
  REGION 1..29: note = Description of Artificial Sequence: Synthetic peptide
  MOD_RES 20: note = Lys(C8)
  REGION 1..29: note = C-term amide
HGQGTFTSDYSKYLDERRAKDFVQWLLNT

SEQ ID NO: 731 - protein, 29 aa, synthetic construct
  REGION 1..29: note = Description of Artificial Sequence: Synthetic peptide
  MOD_RES 20: note = Lys(C12)
  REGION 1..29: note = C-term amide
HGQGTFTSDYSKYLDERRAKDFVQWLLNT

SEQ ID NO: 732 - protein, 29 aa, synthetic construct
  REGION 1..29: note = Description of Artificial Sequence: Synthetic peptide
  MOD_RES 20: note = Lys(C14)
  REGION 1..29: note = C-term amide
HGQGTFTSDYSKYLDERRAKDFVQWLLNT

SEQ ID NO: 733 - protein, 29 aa, synthetic construct
  REGION 1..29: note = Description of Artificial Sequence: Synthetic peptide
  MOD_RES 20: note = Lys(C16)
  REGION 1..29: note = C-term amide
HGQGTFTSDYSKYLDERRAKDFVQWLLNT

SEQ ID NO: 734 - protein, 29 aa, synthetic construct
  REGION 1..29: note = Description of Artificial Sequence: Synthetic peptide
  MOD_RES 20: note = Lys(C18)
  REGION 1..29: note = C-term amide
HGQGTFTSDYSKYLDERRAKDFVQWLLNT

SEQ ID NO: 735 - protein, 29 aa, synthetic construct
  REGION 1..29: note = Description of Artificial Sequence: Synthetic peptide
  MOD_RES 20: note = Lys(C20)
  REGION 1..29: note = C-term amide
HGQGTFTSDYSKYLDERRAKDFVQWLLNT

SEQ ID NO: 736 - protein, 29 aa, synthetic construct
  REGION 1..29: note = Description of Artificial Sequence: Synthetic peptide
  MOD_RES 2: note = Aib
  MOD_RES 17: note = Lys(C8)
  REGION 1..29: note = C-term amide
HXQGTFTSDYSKYLDEKAAKEFIAWLLNT

SEQ ID NO: 737 - protein, 29 aa, synthetic construct
  REGION 1..29: note = Description of Artificial Sequence: Synthetic peptide
  MOD_RES 2: note = Aib
  MOD_RES 17: note = Lys(C12)
  REGION 1..29: note = C-term amide
HXQGTFTSDYSKYLDEKAAKEFIAWLLNT

SEQ ID NO: 738 - protein, 29 aa, synthetic construct
  REGION 1..29: note = Description of Artificial Sequence: Synthetic peptide
  MOD_RES 2: note = Aib
  MOD_RES 17: note = Lys(C14)
  REGION 1..29: note = C-term amide
HXQGTFTSDYSKYLDEKAAKEFIAWLLNT

SEQ ID NO: 739 - protein, 29 aa, synthetic construct
  REGION 1..29: note = Description of Artificial Sequence: Synthetic peptide
  MOD_RES 2: note = Aib
  MOD_RES 17: note = Lys(C16)
  REGION 1..29: note = C-term amide
HXQGTFTSDYSKYLDEKAAKEFIAWLLNT

SEQ ID NO: 740 - protein, 29 aa, synthetic construct
  REGION 1..29: note = Description of Artificial Sequence: Synthetic peptide
  MOD_RES 2: note = Aib
  MOD_RES 17: note = Lys(C18)
  REGION 1..29: note = C-term amide
HXQGTFTSDYSKYLDEKAAKEFIAWLLNT

SEQ ID NO: 741 - protein, 29 aa, synthetic construct
  REGION 1..29: note = Description of Artificial Sequence: Synthetic peptide
  MOD_RES 2: note = Aib
  MOD_RES 17: note = Lys(C20)
  REGION 1..29: note = C-term amide
HXQGTFTSDYSKYLDEKAAKEFIAWLLNT

SEQ ID NO: 742 - protein, 29 aa, synthetic construct
  REGION 1..29: note = Description of Artificial Sequence: Synthetic peptide
  MOD_RES 2: note = Aib
  REGION 16..20: note = misc_feature - Cyclic
  MOD_RES 16: note = Glu is cyclized through side chain to form a lactam linkage
  MOD_RES 20: note = Lys is cyclized through side chain to form a lactam linkage
  MOD_RES 24: note = Lys(C8)
  REGION 1..29: note = C-term amide
HXQGTFTSDYSKYLDEQAAKEFIKWLMNT

SEQ ID NO: 743 - protein, 29 aa, synthetic construct
  REGION 1..29: note = Description of Artificial Sequence: Synthetic peptide
  MOD_RES 2: note = Aib
  REGION 16..20: note = misc_feature - Cyclic
  MOD_RES 16: note = Glu is cyclized through side chain to form a lactam linkage
  MOD_RES 20: note = Lys is cyclized through side chain to form a lactam linkage
  MOD_RES 24: note = Lys(C12)
  REGION 1..29: note = C-term amide
HXQGTFTSDYSKYLDEQAAKEFIKWLMNT

SEQ ID NO: 744 - protein, 29 aa, synthetic construct
  REGION 1..29: note = Description of Artificial Sequence: Synthetic peptide
  MOD_RES 2: note = Aib
  REGION 16..20: note = misc_feature - Cyclic
  MOD_RES 16: note = Glu is cyclized through side chain to form a lactam linkage
  MOD_RES 20: note = Lys is cyclized through side chain to form a lactam linkage
  MOD_RES 24: note = Lys(C14)
  REGION 1..29: note = C-term amide
HXQGTFTSDYSKYLDEQAAKEFIKWLMNT

SEQ ID NO: 745 - protein, 29 aa, synthetic construct
  REGION 1..29: note = Description of Artificial Sequence: Synthetic peptide
  MOD_RES 2: note = Aib
  REGION 16..20: note = misc_feature - Cyclic
  MOD_RES 16: note = Glu is cyclized through side chain to form a lactam linkage
  MOD_RES 20: note = Lys is cyclized through side chain to form a lactam linkage
  MOD_RES 24: note = Lys(C16)
  REGION 1..29: note = C-term amide
HXQGTFTSDYSKYLDEQAAKEFIKWLMNT

SEQ ID NO: 746 - protein, 29 aa, synthetic construct
  REGION 1..29: note = Description of Artificial Sequence: Synthetic peptide
  MOD_RES 2: note = Aib
  REGION 16..20: note = misc_feature - Cyclic
  MOD_RES 16: note = Glu is cyclized through side chain to form a lactam linkage
  MOD_RES 20: note = Lys is cyclized through side chain to form a lactam linkage
  MOD_RES 24: note = Lys(C18)
  REGION 1..29: note = C-term amide
HXQGTFTSDYSKYLDEQAAKEFIKWLMNT

SEQ ID NO: 747 - protein, 29 aa, synthetic construct
  REGION 1..29: note = Description of Artificial Sequence: Synthetic peptide
  MOD_RES 2: note = Aib
  REGION 16..20: note = misc_feature - Cyclic
  MOD_RES 16: note = Glu is cyclized through side chain to form a lactam linkage
  MOD_RES 20: note = Lys is cyclized through side chain to form a lactam linkage
  MOD_RES 24: note = Lys(C20)
  REGION 1..29: note = C-term amide
HXQGTFTSDYSKYLDEQAAKEFIKWLMNT

SEQ ID NO: 748 - protein, 29 aa, synthetic construct
  REGION 1..29: note = Description of Artificial Sequence: Synthetic peptide
  MOD_RES 2: note = Aib
  REGION 16..20: note = misc_feature - Cyclic
  MOD_RES 16: note = Glu is cyclized through side chain to form a lactam linkage
  MOD_RES 20: note = Lys is cyclized through side chain to form a lactam linkage
  MOD_RES 24: note = Lys(C8)
  REGION 1..29: note = C-term amide
HXQGTFTSDYSKYLDEQAAKEFIKWLLNT

SEQ ID NO: 749 - protein, 29 aa, synthetic construct
  REGION 1..29: note = Description of Artificial Sequence: Synthetic peptide
  MOD_RES 2: note = Aib
  REGION 16..20: note = misc_feature - Cyclic
  MOD_RES 16: note = Glu is cyclized through side chain to form a lactam linkage
  MOD_RES 20: note = Lys is cyclized through side chain to form a lactam linkage
  MOD_RES 24: note = Lys(C12)
  REGION 1..29: note = C-term amide
HXQGTFTSDYSKYLDEQAAKEFIKWLLNT

SEQ ID NO: 750 - protein, 29 aa, synthetic construct
  REGION 1..29: note = Description of Artificial Sequence: Synthetic peptide
  MOD_RES 2: note = Aib
  REGION 16..20: note = misc_feature - Cyclic
  MOD_RES 16: note = Glu is cyclized through side chain to form a lactam linkage
  MOD_RES 20: note = Lys is cyclized through side chain to form a lactam linkage
  MOD_RES 24: note = Lys(C14)
  REGION 1..29: note = C-term amide
HXQGTFTSDYSKYLDEQAAKEFIKWLLNT

SEQ ID NO: 751 - protein, 29 aa, synthetic construct
  REGION 1..29: note = Description of Artificial Sequence: Synthetic peptide
  MOD_RES 2: note = Aib
  REGION 16..20: note = misc_feature - Cyclic
  MOD_RES 16: note = Glu is cyclized through side chain to form a lactam linkage
  MOD_RES 20: note = Lys is cyclized through side chain to form a lactam linkage
  MOD_RES 24: note = Lys(C16)
  REGION 1..29: note = C-term amide
HXQGTFTSDYSKYLDEQAAKEFIKWLLNT

SEQ ID NO: 752 - protein, 29 aa, synthetic construct
  REGION 1..29: note = Description of Artificial Sequence: Synthetic peptide
  MOD_RES 2: note = Aib
  REGION 16..20: note = misc_feature - Cyclic
  MOD_RES 16: note = Glu is cyclized through side chain to form a lactam linkage
  MOD_RES 20: note = Lys is cyclized through side chain to form a lactam linkage
  MOD_RES 24: note = Lys(C18)
  REGION 1..29: note = C-term amide
HXQGTFTSDYSKYLDEQAAKEFIKWLLNT

SEQ ID NO: 753 - protein, 29 aa, synthetic construct
  REGION 1..29: note = Description of Artificial Sequence: Synthetic peptide
  MOD_RES 2: note = Aib
  REGION 16..20: note = misc_feature - Cyclic
  MOD_RES 16: note = Glu is cyclized through side chain to form a lactam linkage
  MOD_RES 20: note = Lys is cyclized through side chain to form a lactam linkage
  MOD_RES 24: note = Lys(C20)
  REGION 1..29: note = C-term amide
HXQGTFTSDYSKYLDEQAAKEFIKWLLNT

SEQ ID NO: 754 - protein, 29 aa, synthetic construct
  REGION 1..29: note = Description of Artificial Sequence: Synthetic peptide
  MOD_RES 24: note = Lys(C8)
  REGION 1..29: note = C-term amide
HGQGTFTSDYSKYLDEQAAREFIKWLLNT

SEQ ID NO: 755 - protein, 29 aa, synthetic construct
  REGION 1..29: note = Description of Artificial Sequence: Synthetic peptide
  MOD_RES 24: note = Lys(C12)
  REGION 1..29: note = C-term amide
HGQGTFTSDYSKYLDEQAAREFIKWLLNT

SEQ ID NO: 756 - protein, 29 aa, synthetic construct
  REGION 1..29: note = Description of Artificial Sequence: Synthetic peptide
  MOD_RES 24: note = Lys(C14)
  REGION 1..29: note = C-term amide
HGQGTFTSDYSKYLDEQAAREFIKWLLNT

SEQ ID NO: 757 - protein, 29 aa, synthetic construct
  REGION 1..29: note = Description of Artificial Sequence: Synthetic peptide
  MOD_RES 24: note = Lys(C16)
  REGION 1..29: note = C-term amide
HGQGTFTSDYSKYLDEQAAREFIKWLLNT

SEQ ID NO: 758 - protein, 29 aa, synthetic construct
  REGION 1..29: note = Description of Artificial Sequence: Synthetic peptide
  MOD_RES 24: note = Lys(C18)
  REGION 1..29: note = C-term amide
HGQGTFTSDYSKYLDEQAAREFIKWLLNT

SEQ ID NO: 759 - protein, 29 aa, synthetic construct
  REGION 1..29: note = Description of Artificial Sequence: Synthetic peptide
  MOD_RES 24: note = Lys(C20)
  REGION 1..29: note = C-term amide
HGQGTFTSDYSKYLDEQAAREFIKWLLNT

SEQ ID NO: 760 - protein, 29 aa, synthetic construct
  REGION 1..29: note = Description of Artificial Sequence: Synthetic peptide
  MOD_RES 2: note = Aib
  MOD_RES 17: note = Lys(C8)
  REGION 1..29: note = C-term amide
HXQGTFTSDYSKYLDEKAAREFIAWLLNT

SEQ ID NO: 761 - protein, 29 aa, synthetic construct
  REGION 1..29: note = Description of Artificial Sequence: Synthetic peptide
  MOD_RES 2: note = Aib
  MOD_RES 17: note = Lys(C12)
  REGION 1..29: note = C-term amide
HXQGTFTSDYSKYLDEKAAREFIAWLLNT

SEQ ID NO: 762 - protein, 29 aa, synthetic construct
  REGION 1..29: note = Description of Artificial Sequence: Synthetic peptide
  MOD_RES 2: note = Aib
  MOD_RES 17: note = Lys(C14)
  REGION 1..29: note = C-term amide
HXQGTFTSDYSKYLDEKAAREFIAWLLNT

SEQ ID NO: 763 - protein, 29 aa, synthetic construct
  REGION 1..29: note = Description of Artificial Sequence: Synthetic peptide
  MOD_RES 2: note = Aib
  MOD_RES 17: note = Lys(C16)
  REGION 1..29: note = C-term amide
HXQGTFTSDYSKYLDEKAAREFIAWLLNT

SEQ ID NO: 764 - protein, 29 aa, synthetic construct
  REGION 1..29: note = Description of Artificial Sequence: Synthetic peptide
  MOD_RES 2: note = Aib
  MOD_RES 17: note = Lys(C18)
  REGION 1..29: note = C-term amide
HXQGTFTSDYSKYLDEKAAREFIAWLLNT

SEQ ID NO: 765 - protein, 29 aa, synthetic construct
  REGION 1..29: note = Description of Artificial Sequence: Synthetic peptide
  MOD_RES 2: note = Aib
  MOD_RES 17: note = Lys(C20)
  REGION 1..29: note = C-term amide
HXQGTFTSDYSKYLDEKAAREFIAWLLNT

SEQ ID NO: 766 - protein, 29 aa, synthetic construct
  REGION 1..29: note = Description of Artificial Sequence: Synthetic peptide
  MOD_RES 24: note = Lys(C8)
  REGION 1..29: note = C-term amide
HGQGTFTSDYSKYLDERRAQDFVKWLLNT

SEQ ID NO: 767 - protein, 29 aa, synthetic construct
  REGION 1..29: note = Description of Artificial Sequence: Synthetic peptide
  MOD_RES 24: note = Lys(C12)
  REGION 1..29: note = C-term amide
HGQGTFTSDYSKYLDERRAQDFVKWLLNT

SEQ ID NO: 768 - protein, 29 aa, synthetic construct
  REGION 1..29: note = Description of Artificial Sequence: Synthetic peptide
  MOD_RES 24: note = Lys(C14)
  REGION 1..29: note = C-term amide
HGQGTFTSDYSKYLDERRAQDFVKWLLNT

SEQ ID NO: 769 - protein, 29 aa, synthetic construct
  REGION 1..29: note = Description of Artificial Sequence: Synthetic peptide
  MOD_RES 24: note = Lys(C16)
  REGION 1..29: note = C-term amide
HGQGTFTSDYSKYLDERRAQDFVKWLLNT

SEQ ID NO: 770 - protein, 29 aa, synthetic construct
  REGION 1..29: note = Description of Artificial Sequence: Synthetic peptide
  MOD_RES 24: note = Lys(C18)
  REGION 1..29: note = C-term amide
HGQGTFTSDYSKYLDERRAQDFVKWLLNT

SEQ ID NO: 771 - protein, 29 aa, synthetic construct
  REGION 1..29: note = Description of Artificial Sequence: Synthetic peptide
  MOD_RES 24: note = Lys(C20)
  REGION 1..29: note = C-term amide
HGQGTFTSDYSKYLDERRAQDFVKWLLNT

SEQ ID NO: 772 - protein, 11 aa, synthetic construct
  REGION 1..11: note = Description of Artificial Sequence: Synthetic peptide
  MOD_RES 2: note = Alpha-MePro
  MOD_RES 6: note = Alpha-MeF
  MOD_RES 10: note = Bip
  MOD_RES 11: note = Lys(C8)
  REGION 1..11: note = C-term amide
HPQGTFTSDXK

SEQ ID NO: 773 - protein, 11 aa, synthetic construct
  REGION 1..11: note = Description of Artificial Sequence: Synthetic peptide
  MOD_RES 2: note = Alpha-MePro
  MOD_RES 6: note = Alpha-MeF
  MOD_RES 10: note = Bip
  MOD_RES 11: note = Lys(C12)
  REGION 1..11: note = C-term amide
HPQGTFTSDXK

SEQ ID NO: 774 - protein, 11 aa, synthetic construct
  REGION 1..11: note = Description of Artificial Sequence: Synthetic peptide
  MOD_RES 2: note = Alpha-MePro
  MOD_RES 6: note = Alpha-MeF
  MOD_RES 10: note = Bip
  MOD_RES 11: note = Lys(C14)
  REGION 1..11: note = C-term amide
HPQGTFTSDXK

SEQ ID NO: 775 - protein, 11 aa, synthetic construct
  REGION 1..11: note = Description of Artificial Sequence: Synthetic peptide
  MOD_RES 2: note = Alpha-MePro
  MOD_RES 6: note = Alpha-MeF
  MOD_RES 10: note = Bip
  MOD_RES 11: note = Lys(C16)
  REGION 1..11: note = C-term amide
HPQGTFTSDXK

SEQ ID NO: 776 - protein, 11 aa, synthetic construct
  REGION 1..11: note = Description of Artificial Sequence: Synthetic peptide
  MOD_RES 2: note = Alpha-MePro
  MOD_RES 6: note = Alpha-MeF
  MOD_RES 10: note = Bip
  MOD_RES 11: note = Lys(C18)
  REGION 1..11: note = C-term amide
HPQGTFTSDXK

SEQ ID NO: 777 - protein, 11 aa, synthetic construct
  REGION 1..11: note = Description of Artificial Sequence: Synthetic peptide
  MOD_RES 2: note = Alpha-MePro
  MOD_RES 6: note = Alpha-MeF
  MOD_RES 10: note = Bip
  MOD_RES 11: note = Lys(C20)
  REGION 1..11: note = C-term amide
HPQGTFTSDXK

SEQ ID NO: 778 - protein, 11 aa, synthetic construct
  REGION 1..11: note = Description of Artificial Sequence: Synthetic peptide
  MOD_RES 2: note = Alpha-MePro
  MOD_RES 6: note = Alpha-MeFF
  MOD_RES 10: note = Bip
  MOD_RES 11: note = Lys(C8)
  REGION 1..11: note = C-term amide
HPQGTFTSDXK

SEQ ID NO: 779 - protein, 11 aa, synthetic construct
  REGION 1..11: note = Description of Artificial Sequence: Synthetic peptide
  MOD_RES 2: note = Alpha-MePro
  MOD_RES 6: note = Alpha-MeFF
  MOD_RES 10: note = Bip
  MOD_RES 11: note = Lys(C12)
  REGION 1..11: note = C-term amide
HPQGTFTSDXK

SEQ ID NO: 780 - protein, 11 aa, synthetic construct
  REGION 1..11: note = Description of Artificial Sequence: Synthetic peptide
  MOD_RES 2: note = Alpha-MePro
  MOD_RES 6: note = Alpha-MeFF
  MOD_RES 10: note = Bip
  MOD_RES 11: note = Lys(C14)
  REGION 1..11: note = C-term amide
HPQGTFTSDXK

SEQ ID NO: 781 - protein, 11 aa, synthetic construct
  REGION 1..11: note = Description of Artificial Sequence: Synthetic peptide
  MOD_RES 2: note = Alpha-MePro
  MOD_RES 6: note = Alpha-MeFF
  MOD_RES 10: note = Bip
  MOD_RES 11: note = Lys(C16)
  REGION 1..11: note = C-term amide
HPQGTFTSDXK

SEQ ID NO: 782 - protein, 11 aa, synthetic construct
  REGION 1..11: note = Description of Artificial Sequence: Synthetic peptide
  MOD_RES 2: note = Alpha-MePro
  MOD_RES 6: note = Alpha-MeFF
  MOD_RES 10: note = Bip
  MOD_RES 11: note = Lys(C18)
  REGION 1..11: note = C-term amide
HPQGTFTSDXK

SEQ ID NO: 783 - protein, 11 aa, synthetic construct
  REGION 1..11: note = Description of Artificial Sequence: Synthetic peptide
  MOD_RES 2: note = Alpha-MePro
  MOD_RES 6: note = Alpha-MeFF
  MOD_RES 10: note = Bip
  MOD_RES 11: note = Lys(C20)
  REGION 1..11: note = C-term amide
HPQGTFTSDXK

SEQ ID NO: 784 - protein, 11 aa, synthetic construct
  REGION 1..11: note = Description of Artificial Sequence: Synthetic peptide
  MOD_RES 2: note = Aib
  MOD_RES 6: note = Alpha-MeF
  MOD_RES 10: note = Bip
  MOD_RES 11: note = Lys(C8)
  REGION 1..11: note = C-term amide
HXQGTFTSDXK

SEQ ID NO: 785 - protein, 11 aa, synthetic construct
  REGION 1..11: note = Description of Artificial Sequence: Synthetic peptide
  MOD_RES 2: note = Aib
  MOD_RES 6: note = Alpha-MeF
  MOD_RES 10: note = Bip
  MOD_RES 11: note = Lys(C12)
  REGION 1..11: note = C-term amide
HXQGTFTSDXK

SEQ ID NO: 786 - protein, 11 aa, synthetic construct
  REGION 1..11: note = Description of Artificial Sequence: Synthetic peptide
  MOD_RES 2: note = Aib
  MOD_RES 6: note = Alpha-MeF
  MOD_RES 10: note = Bip
  MOD_RES 11: note = Lys(C14)
  REGION 1..11: note = C-term amide
HXQGTFTSDXK

SEQ ID NO: 787 - protein, 11 aa, synthetic construct
  REGION 1..11: note = Description of Artificial Sequence: Synthetic peptide
  MOD_RES 2: note = Aib
  MOD_RES 6: note = Alpha-MeF
  MOD_RES 10: note = Bip
  MOD_RES 11: note = Lys(C16)
  REGION 1..11: note = C-term amide
HXQGTFTSDXK

SEQ ID NO: 788 - protein, 11 aa, synthetic construct
  REGION 1..11: note = Description of Artificial Sequence: Synthetic peptide
  MOD_RES 2: note = Aib
  MOD_RES 6: note = Alpha-MeF
  MOD_RES 10: note = Bip
  MOD_RES 11: note = Lys(C20)
  REGION 1..11: note = C-term amide
HXQGTFTSDXK

SEQ ID NO: 789 - protein, 11 aa, synthetic construct
  REGION 1..11: note = Description of Artificial Sequence: Synthetic peptide
  MOD_RES 2: note = Aib
  MOD_RES 6: note = Alpha-MeFF
  MOD_RES 10: note = Bip
  MOD_RES 11: note = Lys(C8)
  REGION 1..11: note = C-term amide
HXQGTFTSDXK

SEQ ID NO: 790 - protein, 11 aa, synthetic construct
  REGION 1..11: note = Description of Artificial Sequence: Synthetic peptide
  MOD_RES 2: note = Aib
  MOD_RES 6: note = Alpha-MeFF
  MOD_RES 10: note = Bip
  MOD_RES 11: note = Lys(C12)
  REGION 1..11: note = C-term amide
HXQGTFTSDXK

SEQ ID NO: 791 - protein, 11 aa, synthetic construct
  REGION 1..11: note = Description of Artificial Sequence: Synthetic peptide
  MOD_RES 2: note = Aib
  MOD_RES 6: note = Alpha-MeFF
  MOD_RES 10: note = Bip
  MOD_RES 11: note = Lys(C14)
  REGION 1..11: note = C-term amide
HXQGTFTSDXK

SEQ ID NO: 792 - protein, 11 aa, synthetic construct
  REGION 1..11: note = Description of Artificial Sequence: Synthetic peptide
  MOD_RES 2: note = Aib
  MOD_RES 6: note = Alpha-MeFF
  MOD_RES 10: note = Bip
  MOD_RES 11: note = Lys(C16)
  REGION 1..11: note = C-term amide
HXQGTFTSDXK

SEQ ID NO: 793 - protein, 11 aa, synthetic construct
  REGION 1..11: note = Description of Artificial Sequence: Synthetic peptide
  MOD_RES 2: note = Aib
  MOD_RES 6: note = Alpha-MeFF
  MOD_RES 10: note = Bip
  MOD_RES 11: note = Lys(C18)
  REGION 1..11: note = C-term amide
HXQGTFTSDXK

SEQ ID NO: 794 - protein, 11 aa, synthetic construct
  REGION 1..11: note = Description of Artificial Sequence: Synthetic peptide
  MOD_RES 2: note = Aib
  MOD_RES 6: note = Alpha-MeFF
  MOD_RES 10: note = Bip
  MOD_RES 11: note = Lys(C20)
  REGION 1..11: note = C-term amide
HXQGTFTSDXK

SEQ ID NO: 795 - protein, 29 aa, synthetic construct
  REGION 1..29: note = Description of Artificial Sequence: Synthetic peptide
  MOD_RES 17: note = Lys(C8)
  REGION 1..29: note = C-term amide
HGQGTFTSDYSKYLDAKAAREFIAWLLNT

SEQ ID NO: 796 - protein, 29 aa, synthetic construct
  REGION 1..29: note = Description of Artificial Sequence: Synthetic peptide
  MOD_RES 17: note = Lys(C12)
  REGION 1..29: note = C-term amide
HGQGTFTSDYSKYLDAKAAREFIAWLLNT

SEQ ID NO: 797 - protein, 29 aa, synthetic construct
  REGION 1..29: note = Description of Artificial Sequence: Synthetic peptide
  MOD_RES 17: note = Lys(C14)
  REGION 1..29: note = C-term amide
HGQGTFTSDYSKYLDAKAAREFIAWLLNT

SEQ ID NO: 798 - protein, 29 aa, synthetic construct
  REGION 1..29: note = Description of Artificial Sequence: Synthetic peptide
  MOD_RES 17: note = Lys(C16)
  REGION 1..29: note = C-term amide
HGQGTFTSDYSKYLDAKAAREFIAWLLNT

SEQ ID NO: 799 - protein, 29 aa, synthetic construct
  REGION 1..29: note = Description of Artificial Sequence: Synthetic peptide
  MOD_RES 17: note = Lys(C18)
  REGION 1..29: note = C-term amide
HGQGTFTSDYSKYLDAKAAREFIAWLLNT

SEQ ID NO: 800 - protein, 29 aa, synthetic construct
  REGION 1..29: note = Description of Artificial Sequence: Synthetic peptide
  MOD_RES 17: note = Lys(C20)
  REGION 1..29: note = C-term amide
HGQGTFTSDYSKYLDAKAAREFIAWLLNT

SEQ ID NO: 801 - protein, 29 aa, synthetic construct
  REGION 1..29: note = Description of Artificial Sequence: Synthetic peptide
  MOD_RES 17: note = Lys(C8)
  REGION 1..29: note = C-term amide
HGQGTFTSDYSKYLDAKAAKEFIAWLLNT

SEQ ID NO: 802 - protein, 29 aa, synthetic construct
  REGION 1..29: note = Description of Artificial Sequence: Synthetic peptide
  MOD_RES 17: note = Lys(C12)
  REGION 1..29: note = C-term amide
HGQGTFTSDYSKYLDAKAAKEFIAWLLNT

SEQ ID NO: 803 - protein, 29 aa, synthetic construct
  REGION 1..29: note = Description of Artificial Sequence: Synthetic peptide
  MOD_RES 17: note = Lys(C14)
  REGION 1..29: note = C-term amide
HGQGTFTSDYSKYLDAKAAKEFIAWLLNT

SEQ ID NO: 804 - protein, 29 aa, synthetic construct
  REGION 1..29: note = Description of Artificial Sequence: Synthetic peptide
  MOD_RES 17: note = Lys(C16)
  REGION 1..29: note = C-term amide
HGQGTFTSDYSKYLDAKAAKEFIAWLLNT

SEQ ID NO: 805 - protein, 29 aa, synthetic construct
  REGION 1..29: note = Description of Artificial Sequence: Synthetic peptide
  MOD_RES 17: note = Lys(C18)
  REGION 1..29: note = C-term amide
HGQGTFTSDYSKYLDAKAAKEFIAWLLNT

SEQ ID NO: 806 - protein, 29 aa, synthetic construct
  REGION 1..29: note = Description of Artificial Sequence: Synthetic peptide
  MOD_RES 17: note = Lys(C20)
  REGION 1..29: note = C-term amide
HGQGTFTSDYSKYLDAKAAKEFIAWLLNT

SEQ ID NO: 807 - protein, 29 aa, synthetic construct
  REGION 1..29: note = Description of Artificial Sequence: Synthetic peptide
  MOD_RES 16: note = Aib
  MOD_RES 17: note = Lys(C8)
  REGION 1..29: note = C-term amide
HGQGTFTSDYSKYLDXKAAKEFIAWLLNT

SEQ ID NO: 808 - protein, 29 aa, synthetic construct
  REGION 1..29: note = Description of Artificial Sequence: Synthetic peptide
  MOD_RES 16: note = Aib
  MOD_RES 17: note = Lys(C12)
  REGION 1..29: note = C-term amide
HGQGTFTSDYSKYLDXKAAKEFIAWLLNT

SEQ ID NO: 809 - protein, 29 aa, synthetic construct
  REGION 1..29: note = Description of Artificial Sequence: Synthetic peptide
  MOD_RES 16: note = Aib
  MOD_RES 17: note = Lys(C14)
  REGION 1..29: note = C-term amide
HGQGTFTSDYSKYLDXKAAKEFIAWLLNT

SEQ ID NO: 810 - protein, 29 aa, synthetic construct
  REGION 1..29: note = Description of Artificial Sequence: Synthetic peptide
  MOD_RES 16: note = Aib
  MOD_RES 17: note = Lys(C16)
  REGION 1..29: note = C-term amide
HGQGTFTSDYSKYLDXKAAKEFIAWLLNT

SEQ ID NO: 811 - protein, 29 aa, synthetic construct
  REGION 1..29: note = Description of Artificial Sequence: Synthetic peptide
  MOD_RES 16: note = Aib
  MOD_RES 17: note = Lys(C18)
  REGION 1..29: note = C-term amide
HGQGTFTSDYSKYLDXKAAKEFIAWLLNT

SEQ ID NO: 812 - protein, 29 aa, synthetic construct
  REGION 1..29: note = Description of Artificial Sequence: Synthetic peptide
  MOD_RES 16: note = Aib
  MOD_RES 17: note = Lys(C20)
  REGION 1..29: note = C-term amide
HGQGTFTSDYSKYLDXKAAKEFIAWLLNT

SEQ ID NO: 813 - protein, 29 aa, synthetic construct
  REGION 1..29: note = Description of Artificial Sequence: Synthetic peptide
  MOD_RES 16: note = Aib
  MOD_RES 17: note = Lys(C8)
  REGION 1..29: note = C-term amide
HGQGTFTSDYSKYLDXKAAREFIAWLLNT

SEQ ID NO: 814 - protein, 29 aa, synthetic construct
  REGION 1..29: note = Description of Artificial Sequence: Synthetic peptide
  MOD_RES 16: note = Aib
  MOD_RES 17: note = Lys(C12)
  REGION 1..29: note = C-term amide
HGQGTFTSDYSKYLDXKAAREFIAWLLNT

SEQ ID NO: 815 - protein, 29 aa, synthetic construct
  REGION 1..29: note = Description of Artificial Sequence: Synthetic peptide
  MOD_RES 16: note = Aib
  MOD_RES 17: note = Lys(C14)
  REGION 1..29: note = C-term amide
HGQGTFTSDYSKYLDXKAAREFIAWLLNT

SEQ ID NO: 816 - protein, 29 aa, synthetic construct
  REGION 1..29: note = Description of Artificial Sequence: Synthetic peptide
  MOD_RES 16: note = Aib
  MOD_RES 17: note = Lys(C16)
  REGION 1..29: note = C-term amide
HGQGTFTSDYSKYLDXKAAREFIAWLLNT

SEQ ID NO: 817 - protein, 29 aa, synthetic construct
  REGION 1..29: note = Description of Artificial Sequence: Synthetic peptide
  MOD_RES 16: note = Aib
  MOD_RES 17: note = Lys(C18)
  REGION 1..29: note = C-term amide
HGQGTFTSDYSKYLDXKAAREFIAWLLNT

SEQ ID NO: 818 - protein, 29 aa, synthetic construct
  REGION 1..29: note = Description of Artificial Sequence: Synthetic peptide
  MOD_RES 16: note = Aib
  MOD_RES 17: note = Lys(C20)
  REGION 1..29: note = C-term amide
HGQGTFTSDYSKYLDXKAAREFIAWLLNT

SEQ ID NO: 819 - protein, 29 aa, synthetic construct
  REGION 1..29: note = Description of Artificial Sequence: Synthetic peptide
  MOD_RES 2: note = Aib
  MOD_RES 17: note = Lys(C8)
  REGION 1..29: note = C-term amide
HXQGTFTSDYSKYLDAKAAKEFIAWLLNT

SEQ ID NO: 820 - protein, 29 aa, synthetic construct
  REGION 1..29: note = Description of Artificial Sequence: Synthetic peptide
  MOD_RES 2: note = Aib
  MOD_RES 17: note = Lys(C12)
  REGION 1..29: note = C-term amide
HXQGTFTSDYSKYLDAKAAKEFIAWLLNT

SEQ ID NO: 821 - protein, 29 aa, synthetic construct
  REGION 1..29: note = Description of Artificial Sequence: Synthetic peptide
  MOD_RES 2: note = Aib
  MOD_RES 17: note = Lys(C14)
  REGION 1..29: note = C-term amide
HXQGTFTSDYSKYLDAKAAKEFIAWLLNT

SEQ ID NO: 822 - protein, 29 aa, synthetic construct
  REGION 1..29: note = Description of Artificial Sequence: Synthetic peptide
  MOD_RES 2: note = Aib
  MOD_RES 17: note = Lys(C16)
  REGION 1..29: note = C-term amide
HXQGTFTSDYSKYLDAKAAKEFIAWLLNT

SEQ ID NO: 823 - protein, 29 aa, synthetic construct
  REGION 1..29: note = Description of Artificial Sequence: Synthetic peptide
  MOD_RES 2: note = Aib
  MOD_RES 17: note = Lys(C18)
  REGION 1..29: note = C-term amide
HXQGTFTSDYSKYLDAKAAKEFIAWLLNT

SEQ ID NO: 824 - protein, 29 aa, synthetic construct
  REGION 1..29: note = Description of Artificial Sequence: Synthetic peptide
  MOD_RES 2: note = Aib
  MOD_RES 17: note = Lys(C20)
  REGION 1..29: note = C-term amide
HXQGTFTSDYSKYLDAKAAKEFIAWLLNT

SEQ ID NO: 825 - protein, 29 aa, synthetic construct
  REGION 1..29: note = Description of Artificial Sequence: Synthetic peptide
  MOD_RES 2: note = Aib
  MOD_RES 17: note = Lys(C8)
  REGION 1..29: note = C-term amide
HXQGTFTSDYSKYLDAKAAREFIAWLLNT

SEQ ID NO: 826 - protein, 29 aa, synthetic construct
  REGION 1..29: note = Description of Artificial Sequence: Synthetic peptide
  MOD_RES 2: note = Aib
  MOD_RES 17: note = Lys(C12)
  REGION 1..29: note = C-term amide
HXQGTFTSDYSKYLDAKAAREFIAWLLNT

SEQ ID NO: 827 - protein, 29 aa, synthetic construct
  REGION 1..29: note = Description of Artificial Sequence: Synthetic peptide
  MOD_RES 2: note = Aib
  MOD_RES 17: note = Lys(C14)
  REGION 1..29: note = C-term amide
HXQGTFTSDYSKYLDAKAAREFIAWLLNT

SEQ ID NO: 828 - protein, 29 aa, synthetic construct
  REGION 1..29: note = Description of Artificial Sequence: Synthetic peptide
  MOD_RES 2: note = Aib
  MOD_RES 17: note = Lys(C16)
  REGION 1..29: note = C-term amide
HXQGTFTSDYSKYLDAKAAREFIAWLLNT

SEQ ID NO: 829 - protein, 29 aa, synthetic construct
  REGION 1..29: note = Description of Artificial Sequence: Synthetic peptide
  MOD_RES 2: note = Aib
  MOD_RES 17: note = Lys(C18)
  REGION 1..29: note = C-term amide
HXQGTFTSDYSKYLDAKAAREFIAWLLNT

SEQ ID NO: 830 - protein, 29 aa, synthetic construct
  REGION 1..29: note = Description of Artificial Sequence: Synthetic peptide
  MOD_RES 2: note = Aib
  MOD_RES 17: note = Lys(C20)
  REGION 1..29: note = C-term amide
HXQGTFTSDYSKYLDAKAAREFIAWLLNT

SEQ ID NO: 831 - protein, 29 aa, synthetic construct
  REGION 1..29: note = Description of Artificial Sequence: Synthetic peptide
  MOD_RES 24: note = Lys(C8)
  REGION 1..29: note = C-term amide
HGQGTFTSDYSKYLDAQAAREFIKWLLNT

SEQ ID NO: 832 - protein, 29 aa, synthetic construct
  REGION 1..29: note = Description of Artificial Sequence: Synthetic peptide
  MOD_RES 24: note = Lys(C12)
  REGION 1..29: note = C-term amide
HGQGTFTSDYSKYLDAQAAREFIKWLLNT

SEQ ID NO: 833 - protein, 29 aa, synthetic construct
  REGION 1..29: note = Description of Artificial Sequence: Synthetic peptide
  MOD_RES 24: note = Lys(C14)
  REGION 1..29: note = C-term amide
HGQGTFTSDYSKYLDAQAAREFIKWLLNT

SEQ ID NO: 834 - protein, 29 aa, synthetic construct
  REGION 1..29: note = Description of Artificial Sequence: Synthetic peptide
  MOD_RES 24: note = Lys(C16)
  REGION 1..29: note = C-term amide
HGQGTFTSDYSKYLDAQAAREFIKWLLNT

SEQ ID NO: 835 - protein, 29 aa, synthetic construct
  REGION 1..29: note = Description of Artificial Sequence: Synthetic peptide
  MOD_RES 24: note = Lys(C18)
  REGION 1..29: note = C-term amide
HGQGTFTSDYSKYLDAQAAREFIKWLLNT

SEQ ID NO: 836 - protein, 29 aa, synthetic construct
  REGION 1..29: note = Description of Artificial Sequence: Synthetic peptide
  MOD_RES 24: note = Lys(C20)
  REGION 1..29: note = C-term amide
HGQGTFTSDYSKYLDAQAAREFIKWLLNT

SEQ ID NO: 837 - protein, 29 aa, synthetic construct
  REGION 1..29: note = Description of Artificial Sequence: Synthetic peptide
  MOD_RES 20: note = Lys(C8)
  REGION 1..29: note = C-term amide
HGQGTFTSDYSKYLDARRAKDFVQWLLNT

SEQ ID NO: 838 - protein, 29 aa, synthetic construct
  REGION 1..29: note = Description of Artificial Sequence: Synthetic peptide
  MOD_RES 20: note = Lys(12)
  REGION 1..29: note = C-term amide
HGQGTFTSDYSKYLDARRAKDFVQWLLNT

SEQ ID NO: 839 - protein, 29 aa, synthetic construct
  REGION 1..29: note = Description of Artificial Sequence: Synthetic peptide
  MOD_RES 20: note = Lys(C14)
  REGION 1..29: note = C-term amide
HGQGTFTSDYSKYLDARRAKDFVQWLLNT

SEQ ID NO: 840 - protein, 29 aa, synthetic construct
  REGION 1..29: note = Description of Artificial Sequence: Synthetic peptide
  MOD_RES 20: note = Lys(C16)
  REGION 1..29: note = C-term amide
HGQGTFTSDYSKYLDARRAKDFVQWLLNT

SEQ ID NO: 841 - protein, 29 aa, synthetic construct
  REGION 1..29: note = Description of Artificial Sequence: Synthetic peptide
  MOD_RES 20: note = Lys(C18)
  REGION 1..29: note = C-term amide
HGQGTFTSDYSKYLDARRAKDFVQWLLNT

SEQ ID NO: 842 - protein, 29 aa, synthetic construct
  REGION 1..29: note = Description of Artificial Sequence: Synthetic peptide
  MOD_RES 20: note = Lys(C20)
  REGION 1..29: note = C-term amide
HGQGTFTSDYSKYLDARRAKDFVQWLLNT

SEQ ID NO: 843 - protein, 29 aa, synthetic construct
  REGION 1..29: note = Description of Artificial Sequence: Synthetic peptide
  MOD_RES 2: note = Aib
  MOD_RES 20: note = Lys(C18)
  REGION 1..29: note = C-term amide
HXQGTFTSDYSKYLDARRAKDFVQWLLNT

SEQ ID NO: 844 - protein, 29 aa, synthetic construct
  REGION 1..29: note = Description of Artificial Sequence: Synthetic peptide
  MOD_RES 2: note = Aib
  MOD_RES 20: note = Lys(C8)
  REGION 1..29: note = C-term amide
HXQGTFTSDYSKYLDARRAKDFVQWLLNT

SEQ ID NO: 845 - protein, 29 aa, synthetic construct
  REGION 1..29: note = Description of Artificial Sequence: Synthetic peptide
  MOD_RES 2: note = Aib
  MOD_RES 20: note = Lys(C14)
  REGION 1..29: note = C-term amide
HXQGTFTSDYSKYLDARRAKDFVQWLLNT

SEQ ID NO: 846 - protein, 29 aa, synthetic construct
  REGION 1..29: note = Description of Artificial Sequence: Synthetic peptide
  MOD_RES 2: note = Aib
  MOD_RES 20: note = Lys(C16)
  REGION 1..29: note = C-term amide
HXQGTFTSDYSKYLDARRAKDFVQWLLNT

SEQ ID NO: 847 - protein, 29 aa, synthetic construct
  REGION 1..29: note = Description of Artificial Sequence: Synthetic peptide
  MOD_RES 2: note = Aib
  MOD_RES 20: note = Lys(C20)
  REGION 1..29: note = C-term amide
HXQGTFTSDYSKYLDARRAKDFVQWLLNT

SEQ ID NO: 848 - protein, 29 aa, synthetic construct
  REGION 1..29: note = Description of Artificial Sequence: Synthetic peptide
  MOD_RES 24: note = Lys(C8)
  REGION 1..29: note = C-term amide
HGQGTFTSDYSKYLDARRAQDFVKWLLNT

SEQ ID NO: 849 - protein, 29 aa, synthetic construct
  REGION 1..29: note = Description of Artificial Sequence: Synthetic peptide
  MOD_RES 24: note = Lys(C12)
  REGION 1..29: note = C-term amide
HGQGTFTSDYSKYLDARRAQDFVKWLLNT

SEQ ID NO: 850 - protein, 29 aa, synthetic construct
  REGION 1..29: note = Description of Artificial Sequence: Synthetic peptide
  MOD_RES 24: note = Lys(C14)
  REGION 1..29: note = C-term amide
HGQGTFTSDYSKYLDARRAQDFVKWLLNT

SEQ ID NO: 851 - protein, 29 aa, synthetic construct
  REGION 1..29: note = Description of Artificial Sequence: Synthetic peptide
  MOD_RES 24: note = Lys(C16)
  REGION 1..29: note = C-term amide
HGQGTFTSDYSKYLDARRAQDFVKWLLNT

SEQ ID NO: 852 - protein, 29 aa, synthetic construct
  REGION 1..29: note = Description of Artificial Sequence: Synthetic peptide
  MOD_RES 24: note = Lys(C18)
  REGION 1..29: note = C-term amide
HGQGTFTSDYSKYLDARRAQDFVKWLLNT

SEQ ID NO: 853 - protein, 29 aa, synthetic construct
  REGION 1..29: note = Description of Artificial Sequence: Synthetic peptide
  MOD_RES 24: note = Lys(C20)
  REGION 1..29: note = C-term amide
HGQGTFTSDYSKYLDARRAQDFVKWLLNT

SEQ ID NO: 854 - protein, 29 aa, synthetic construct
  REGION 1..29: note = Description of Artificial Sequence: Synthetic peptide
  MOD_RES 2: note = Aib
  MOD_RES 16: note = Aib
  MOD_RES 17: note = Lys(C18)
  REGION 1..29: note = C-term amide
HXQGTFTSDYSKYLDXKAAKEFIAWLLNT

SEQ ID NO: 855 - protein, 29 aa, synthetic construct
  REGION 1..29: note = Description of Artificial Sequence: Synthetic peptide
  MOD_RES 2: note = Aib
  MOD_RES 16: note = Aib
  MOD_RES 17: note = Lys(C8)
  REGION 1..29: note = C-term amide
HXQGTFTSDYSKYLDXKAAKEFIAWLLNT

SEQ ID NO: 856 - protein, 29 aa, synthetic construct
  REGION 1..29: note = Description of Artificial Sequence: Synthetic peptide
  MOD_RES 2: note = Aib
  MOD_RES 16: note = Aib
  MOD_RES 17: note = Lys(C12)
  REGION 1..29: note = C-term amide
HXQGTFTSDYSKYLDXKAAKEFIAWLLNT

SEQ ID NO: 857 - protein, 29 aa, synthetic construct
  REGION 1..29: note = Description of Artificial Sequence: Synthetic peptide
  MOD_RES 2: note = Aib
  MOD_RES 16: note = Aib
  MOD_RES 17: note = Lys(C14)
  REGION 1..29: note = C-term amide
HXQGTFTSDYSKYLDXKAAKEFIAWLLNT

SEQ ID NO: 858 - protein, 29 aa, synthetic construct
  REGION 1..29: note = Description of Artificial Sequence: Synthetic peptide
  MOD_RES 2: note = Aib
  MOD_RES 16: note = Aib
  MOD_RES 17: note = Lys(C16)
  REGION 1..29: note = C-term amide
HXQGTFTSDYSKYLDXKAAKEFIAWLLNT

SEQ ID NO: 859 - protein, 29 aa, synthetic construct
  REGION 1..29: note = Description of Artificial Sequence: Synthetic peptide
  MOD_RES 2: note = Aib
  MOD_RES 16: note = Aib
  MOD_RES 17: note = Lys(C18)
  REGION 1..29: note = C-term amide
HXQGTFTSDYSKYLDXKAAKEFIAWLLNT

SEQ ID NO: 860 - protein, 29 aa, synthetic construct
  REGION 1..29: note = Description of Artificial Sequence: Synthetic peptide
  MOD_RES 2: note = Aib
  MOD_RES 16: note = Aib
  MOD_RES 17: note = Lys(C20)
  REGION 1..29: note = C-term amide
HXQGTFTSDYSKYLDXKAAKEFIAWLLNT

SEQ ID NO: 861 - protein, 29 aa, synthetic construct
  REGION 1..29: note = Description of Artificial Sequence: Synthetic peptide
  MOD_RES 2: note = Aib
  MOD_RES 16: note = Aib
  MOD_RES 17: note = Lys(C8)
  REGION 1..29: note = C-term amide
HXQGTFTSDYSKYLDXKAAREFIAWLLNT

SEQ ID NO: 862 - protein, 29 aa, synthetic construct
  REGION 1..29: note = Description of Artificial Sequence: Synthetic peptide
  MOD_RES 2: note = Aib
  MOD_RES 16: note = Aib
  MOD_RES 17: note = Lys(C12)
  REGION 1..29: note = C-term amide
HXQGTFTSDYSKYLDXKAAREFIAWLLNT

SEQ ID NO: 863 - protein, 29 aa, synthetic construct
  REGION 1..29: note = Description of Artificial Sequence: Synthetic peptide
  MOD_RES 2: note = Aib
  MOD_RES 16: note = Aib
  MOD_RES 17: note = Lys(C14)
  REGION 1..29: note = C-term amide
HXQGTFTSDYSKYLDXKAAREFIAWLLNT

SEQ ID NO: 864 - protein, 29 aa, synthetic construct
  REGION 1..29: note = Description of Artificial Sequence: Synthetic peptide
  MOD_RES 2: note = Aib
  MOD_RES 16: note = Aib
  MOD_RES 17: note = Lys(C16)
  REGION 1..29: note = C-term amide
HXQGTFTSDYSKYLDXKAAREFIAWLLNT

SEQ ID NO: 865 - protein, 29 aa, synthetic construct
  REGION 1..29: note = Description of Artificial Sequence: Synthetic peptide
  MOD_RES 2: note = Aib
  MOD_RES 16: note = Aib
  MOD_RES 17: note = Lys(C18)
  REGION 1..29: note = C-term amide
HXQGTFTSDYSKYLDXKAAREFIAWLLNT

SEQ ID NO: 866 - protein, 29 aa, synthetic construct
  REGION 1..29: note = Description of Artificial Sequence: Synthetic peptide
  MOD_RES 2: note = Aib
  MOD_RES 16: note = Aib
  MOD_RES 17: note = Lys(C20)
  REGION 1..29: note = C-term amide
HXQGTFTSDYSKYLDXKAAREFIAWLLNT

SEQ ID NO: 867 - protein, 29 aa, synthetic construct
  REGION 1..29: note = Description of Artificial Sequence: Synthetic peptide
  MOD_RES 2: note = Aib
  MOD_RES 16: note = Aib
  MOD_RES 20: note = Lys(C18)
  REGION 1..29: note = C-term amide
HXQGTFTSDYSKYLDXRRAKDFVQWLLNT

SEQ ID NO: 868 - protein, 29 aa, synthetic construct
  REGION 1..29: note = Description of Artificial Sequence: Synthetic peptide
  MOD_RES 2: note = Aib
  MOD_RES 16: note = Aib
  MOD_RES 20: note = Lys(C8)
  REGION 1..29: note = C-term amide
HXQGTFTSDYSKYLDXRRAKDFVQWLLNT

SEQ ID NO: 869 - protein, 29 aa, synthetic construct
  REGION 1..29: note = Description of Artificial Sequence: Synthetic peptide
  MOD_RES 2: note = Aib
  MOD_RES 16: note = Aib
  MOD_RES 20: note = Lys(C14)
  REGION 1..29: note = C-term amide
HXQGTFTSDYSKYLDXRRAKDFVQWLLNT

SEQ ID NO: 870 - protein, 29 aa, synthetic construct
  REGION 1..29: note = Description of Artificial Sequence: Synthetic peptide
  MOD_RES 2: note = Aib
  MOD_RES 16: note = Aib
  MOD_RES 20: note = Lys(C16)
  REGION 1..29: note = C-term amide
HXQGTFTSDYSKYLDXRRAKDFVQWLLNT

SEQ ID NO: 871 - protein, 29 aa, synthetic construct
  REGION 1..29: note = Description of Artificial Sequence: Synthetic peptide
  MOD_RES 2: note = Aib
  MOD_RES 16: note = Aib
  MOD_RES 20: note = Lys(C20)
  REGION 1..29: note = C-term amide
HXQGTFTSDYSKYLDXRRAKDFVQWLLNT

SEQ ID NO: 872 - protein, 29 aa, synthetic construct
  REGION 1..29: note = Description of Artificial Sequence: Synthetic peptide
  MOD_RES 16: note = Aib
  MOD_RES 20: note = Lys(C8)
  REGION 1..29: note = C-term amide
HGQGTFTSDYSKYLDXRRAKDFVQWLLNT

SEQ ID NO: 873 - protein, 29 aa, synthetic construct
  REGION 1..29: note = Description of Artificial Sequence: Synthetic peptide
  MOD_RES 16: note = Aib
  MOD_RES 20: note = Lys(C12)
  REGION 1..29: note = C-term amide
HGQGTFTSDYSKYLDXRRAKDFVQWLLNT

SEQ ID NO: 874 - protein, 29 aa, synthetic construct
  REGION 1..29: note = Description of Artificial Sequence: Synthetic peptide
  MOD_RES 16: note = Aib
  MOD_RES 20: note = Lys(C14)
  REGION 1..29: note = C-term amide
HGQGTFTSDYSKYLDXRRAKDFVQWLLNT

SEQ ID NO: 875 - protein, 29 aa, synthetic construct
  REGION 1..29: note = Description of Artificial Sequence: Synthetic peptide
  MOD_RES 16: note = Aib
  MOD_RES 20: note = Lys(C16)
  REGION 1..29: note = C-term amide
HGQGTFTSDYSKYLDXRRAKDFVQWLLNT

SEQ ID NO: 876 - protein, 29 aa, synthetic construct
  REGION 1..29: note = Description of Artificial Sequence: Synthetic peptide
  MOD_RES 16: note = Aib
  MOD_RES 20: note = Lys(C18)
  REGION 1..29: note = C-term amide
HGQGTFTSDYSKYLDXRRAKDFVQWLLNT

SEQ ID NO: 877 - protein, 29 aa, synthetic construct
  REGION 1..29: note = Description of Artificial Sequence: Synthetic peptide
  MOD_RES 16: note = Aib
  MOD_RES 20: note = Lys(C20)
  REGION 1..29: note = C-term amide
HGQGTFTSDYSKYLDXRRAKDFVQWLLNT

SEQ ID NO: 878 - protein, 29 aa, synthetic construct
  REGION 1..29: note = Description of Artificial Sequence: Synthetic peptide
  MOD_RES 16: note = Aib
  MOD_RES 24: note = Lys(C8)
  REGION 1..29: note = C-term amide
HGQGTFTSDYSKYLDXQAAREFIKWLLNT

SEQ ID NO: 879 - protein, 29 aa, synthetic construct
  REGION 1..29: note = Description of Artificial Sequence: Synthetic peptide
  MOD_RES 16: note = Aib
  MOD_RES 24: note = Lys(C12)
  REGION 1..29: note = C-term amide
HGQGTFTSDYSKYLDXQAAREFIKWLLNT

SEQ ID NO: 880 - protein, 29 aa, synthetic construct
  REGION 1..29: note = Description of Artificial Sequence: Synthetic peptide
  MOD_RES 16: note = Aib
  MOD_RES 24: note = Lys(C14)
  REGION 1..29: note = C-term amide
HGQGTFTSDYSKYLDXQAAREFIKWLLNT

SEQ ID NO: 881 - protein, 29 aa, synthetic construct
  REGION 1..29: note = Description of Artificial Sequence: Synthetic peptide
  MOD_RES 16: note = Aib
  MOD_RES 24: note = Lys(C16)
  REGION 1..29: note = C-term amide
HGQGTFTSDYSKYLDXQAAREFIKWLLNT

SEQ ID NO: 882 - protein, 29 aa, synthetic construct
  REGION 1..29: note = Description of Artificial Sequence: Synthetic peptide
  MOD_RES 16: note = Aib
  MOD_RES 24: note = Lys(C18)
  REGION 1..29: note = C-term amide
HGQGTFTSDYSKYLDXQAAREFIKWLLNT

SEQ ID NO: 883 - protein, 29 aa, synthetic construct
  REGION 1..29: note = Description of Artificial Sequence: Synthetic peptide
  MOD_RES 16: note = Aib
  MOD_RES 24: note = Lys(C20)
  REGION 1..29: note = C-term amide
HGQGTFTSDYSKYLDXQAAREFIKWLLNT

SEQ ID NO: 884 - protein, 29 aa, synthetic construct
  REGION 1..29: note = Description of Artificial Sequence: Synthetic peptide
  MOD_RES 16: note = Aib
  MOD_RES 24: note = Lys(C8)
  REGION 1..29: note = C-term amide
HGQGTFTSDYSKYLDXRRAQDFVKWLLNT

SEQ ID NO: 885 - protein, 29 aa, synthetic construct
  REGION 1..29: note = Description of Artificial Sequence: Synthetic peptide
  MOD_RES 16: note = Aib
  MOD_RES 24: note = Lys(C12)
  REGION 1..29: note = C-term amide
HGQGTFTSDYSKYLDXRRAQDFVKWLLNT

SEQ ID NO: 886 - protein, 29 aa, synthetic construct
  REGION 1..29: note = Description of Artificial Sequence: Synthetic peptide
  MOD_RES 16: note = Aib
  MOD_RES 24: note = Lys(C14)
  REGION 1..29: note = C-term amide
HGQGTFTSDYSKYLDXRRAQDFVKWLLNT

SEQ ID NO: 887 - protein, 29 aa, synthetic construct
  REGION 1..29: note = Description of Artificial Sequence: Synthetic peptide
  MOD_RES 16: note = Aib
  MOD_RES 24: note = Lys(C16)
  REGION 1..29: note = C-term amide
HGQGTFTSDYSKYLDXRRAQDFVKWLLNT

SEQ ID NO: 888 - protein, 29 aa, synthetic construct
  REGION 1..29: note = Description of Artificial Sequence: Synthetic peptide
  MOD_RES 16: note = Aib
  MOD_RES 24: note = Lys(C18)
  REGION 1..29: note = C-term amide
HGQGTFTSDYSKYLDXRRAQDFVKWLLNT

SEQ ID NO: 889 - protein, 29 aa, synthetic construct
  REGION 1..29: note = Description of Artificial Sequence: Synthetic peptide
  MOD_RES 16: note = Aib
  MOD_RES 24: note = Lys(C20)
  REGION 1..29: note = C-term amide
HGQGTFTSDYSKYLDXRRAQDFVKWLLNT

SEQ ID NO: 890 - protein, 29 aa, synthetic construct
  REGION 1..29: note = Description of Artificial Sequence: Synthetic peptide
  MOD_RES 24: note = Lys(C8)
  REGION 1..29: note = C-term amide
HGQGTFTSDYSKYLDEQAAREFIKWLLQT

SEQ ID NO: 891 - protein, 29 aa, synthetic construct
  REGION 1..29: note = Description of Artificial Sequence: Synthetic peptide
  MOD_RES 24: note = Lys(C12)
  REGION 1..29: note = C-term amide
HGQGTFTSDYSKYLDEQAAREFIKWLLQT

SEQ ID NO: 892 - protein, 29 aa, synthetic construct
  REGION 1..29: note = Description of Artificial Sequence: Synthetic peptide
  MOD_RES 24: note = Lys(C14)
  REGION 1..29: note = C-term amide
HGQGTFTSDYSKYLDEQAAREFIKWLLQT

SEQ ID NO: 893 - protein, 29 aa, synthetic construct
  REGION 1..29: note = Description of Artificial Sequence: Synthetic peptide
  MOD_RES 24: note = Lys(C16)
  REGION 1..29: note = C-term amide
HGQGTFTSDYSKYLDEQAAREFIKWLLQT

SEQ ID NO: 894 - protein, 29 aa, synthetic construct
  REGION 1..29: note = Description of Artificial Sequence: Synthetic peptide
  MOD_RES 24: note = Lys(C18)
  REGION 1..29: note = C-term amide
HGQGTFTSDYSKYLDEQAAREFIKWLLQT

SEQ ID NO: 895 - protein, 29 aa, synthetic construct
  REGION 1..29: note = Description of Artificial Sequence: Synthetic peptide
  MOD_RES 24: note = Lys(C20)
  REGION 1..29: note = C-term amide
HGQGTFTSDYSKYLDEQAAREFIKWLLQT

SEQ ID NO: 896 - protein, 29 aa, synthetic construct
  REGION 1..29: note = Description of Artificial Sequence: Synthetic peptide
  MOD_RES 17: note = Lys(C8)
  REGION 1..29: note = C-term amide
HGQGTFTSDYSKYLDEKAAREFIAWLLQT

SEQ ID NO: 897 - protein, 29 aa, synthetic construct
  REGION 1..29: note = Description of Artificial Sequence: Synthetic peptide
  MOD_RES 17: note = Lys(C12)
  REGION 1..29: note = C-term amide
HGQGTFTSDYSKYLDEKAAREFIAWLLQT

SEQ ID NO: 898 - protein, 29 aa, synthetic construct
  REGION 1..29: note = Description of Artificial Sequence: Synthetic peptide
  MOD_RES 17: note = Lys(C14)
  REGION 1..29: note = C-term amide
HGQGTFTSDYSKYLDEKAAREFIAWLLQT

SEQ ID NO: 899 - protein, 29 aa, synthetic construct
  REGION 1..29: note = Description of Artificial Sequence: Synthetic peptide
  MOD_RES 17: note = Lys(C16)
  REGION 1..29: note = C-term amide
HGQGTFTSDYSKYLDEKAAREFIAWLLQT

SEQ ID NO: 900 - protein, 29 aa, synthetic construct
  REGION 1..29: note = Description of Artificial Sequence: Synthetic peptide
  MOD_RES 17: note = Lys(C18)
  REGION 1..29: note = C-term amide
HGQGTFTSDYSKYLDEKAAREFIAWLLQT

SEQ ID NO: 901 - protein, 29 aa, synthetic construct
  REGION 1..29: note = Description of Artificial Sequence: Synthetic peptide
  MOD_RES 17: note = Lys(C20)
  REGION 1..29: note = C-term amide
HGQGTFTSDYSKYLDEKAAREFIAWLLQT

SEQ ID NO: 902 - protein, 29 aa, synthetic construct
  REGION 1..29: note = Description of Artificial Sequence: Synthetic peptide
  MOD_RES 17: note = Lys(C8)
  REGION 1..29: note = C-term amide
HGQGTFTSDYSKYLDEKAAKEFIAWLLQT

SEQ ID NO: 903 - protein, 29 aa, synthetic construct
  REGION 1..29: note = Description of Artificial Sequence: Synthetic peptide
  MOD_RES 17: note = Lys(C12)
  REGION 1..29: note = C-term amide
HGQGTFTSDYSKYLDEKAAKEFIAWLLQT

SEQ ID NO: 904 - protein, 29 aa, synthetic construct
  REGION 1..29: note = Description of Artificial Sequence: Synthetic peptide
  MOD_RES 17: note = Lys(C14)
  REGION 1..29: note = C-term amide
HGQGTFTSDYSKYLDEKAAKEFIAWLLQT

SEQ ID NO: 905 - protein, 29 aa, synthetic construct
  REGION 1..29: note = Description of Artificial Sequence: Synthetic peptide
  MOD_RES 17: note = Lys(C16)
  REGION 1..29: note = C-term amide
HGQGTFTSDYSKYLDEKAAKEFIAWLLQT

SEQ ID NO: 906 - protein, 29 aa, synthetic construct
  REGION 1..29: note = Description of Artificial Sequence: Synthetic peptide
  MOD_RES 17: note = Lys(C18)
  REGION 1..29: note = C-term amide
HGQGTFTSDYSKYLDEKAAKEFIAWLLQT

SEQ ID NO: 907 - protein, 29 aa, synthetic construct
  REGION 1..29: note = Description of Artificial Sequence: Synthetic peptide
  MOD_RES 17: note = Lys(C20)
  REGION 1..29: note = C-term amide
HGQGTFTSDYSKYLDEKAAKEFIAWLLQT

SEQ ID NO: 908 - protein, 29 aa, synthetic construct
  REGION 1..29: note = Description of Artificial Sequence: Synthetic peptide
  MOD_RES 2: note = Aib
  MOD_RES 17: note = Lys(C8)
  REGION 1..29: note = C-term amide
HXQGTFTSDYSKYLDEKAAKEFIAWLLQT

SEQ ID NO: 909 - protein, 29 aa, synthetic construct
  REGION 1..29: note = Description of Artificial Sequence: Synthetic peptide
  MOD_RES 2: note = Aib
  MOD_RES 17: note = Lys(C12)
  REGION 1..29: note = C-term amide
HXQGTFTSDYSKYLDEKAAKEFIAWLLQT

SEQ ID NO: 910 - protein, 29 aa, synthetic construct
  REGION 1..29: note = Description of Artificial Sequence: Synthetic peptide
  MOD_RES 2: note = Aib
  MOD_RES 17: note = Lys(C14)
  REGION 1..29: note = C-term amide
HXQGTFTSDYSKYLDEKAAKEFIAWLLQT

SEQ ID NO: 911 - protein, 29 aa, synthetic construct
  REGION 1..29: note = Description of Artificial Sequence: Synthetic peptide
  MOD_RES 2: note = Aib
  MOD_RES 17: note = Lys(C16)
  REGION 1..29: note = C-term amide
HXQGTFTSDYSKYLDEKAAKEFIAWLLQT

SEQ ID NO: 912 - protein, 29 aa, synthetic construct
  REGION 1..29: note = Description of Artificial Sequence: Synthetic peptide
  MOD_RES 2: note = Aib
  MOD_RES 17: note = Lys(C18)
  REGION 1..29: note = C-term amide
HXQGTFTSDYSKYLDEKAAKEFIAWLLQT

SEQ ID NO: 913 - protein, 29 aa, synthetic construct
  REGION 1..29: note = Description of Artificial Sequence: Synthetic peptide
  MOD_RES 2: note = Aib
  MOD_RES 17: note = Lys(C20)
  REGION 1..29: note = C-term amide
HXQGTFTSDYSKYLDEKAAKEFIAWLLQT

SEQ ID NO: 914 - protein, 29 aa, synthetic construct
  REGION 1..29: note = Description of Artificial Sequence: Synthetic peptide
  MOD_RES 2: note = Aib
  MOD_RES 16: note = Aib
  MOD_RES 17: note = Lys(C8)
  REGION 1..29: note = C-term amide
HXQGTFTSDYSKYLDXKAAREFIAWLLQT

SEQ ID NO: 915 - protein, 29 aa, synthetic construct
  REGION 1..29: note = Description of Artificial Sequence: Synthetic peptide
  MOD_RES 2: note = Aib
  MOD_RES 16: note = Aib
  MOD_RES 17: note = Lys(C12)
  REGION 1..29: note = C-term amide
HXQGTFTSDYSKYLDXKAAREFIAWLLQT

SEQ ID NO: 916 - protein, 29 aa, synthetic construct
  REGION 1..29: note = Description of Artificial Sequence: Synthetic peptide
  MOD_RES 2: note = Aib
  MOD_RES 16: note = Aib
  MOD_RES 17: note = Lys(C14)
  REGION 1..29: note = C-term amide
HXQGTFTSDYSKYLDXKAAREFIAWLLQT

SEQ ID NO: 917 - protein, 29 aa, synthetic construct
  REGION 1..29: note = Description of Artificial Sequence: Synthetic peptide
  MOD_RES 2: note = Aib
  MOD_RES 16: note = Aib
  MOD_RES 17: note = Lys(C16)
  REGION 1..29: note = C-term amide
HXQGTFTSDYSKYLDXKAAREFIAWLLQT

SEQ ID NO: 918 - protein, 29 aa, synthetic construct
  REGION 1..29: note = Description of Artificial Sequence: Synthetic peptide
  MOD_RES 2: note = Aib
  MOD_RES 16: note = Aib
  MOD_RES 17: note = Lys(C18)
  REGION 1..29: note = C-term amide
HXQGTFTSDYSKYLDXKAAREFIAWLLQT

SEQ ID NO: 919 - protein, 29 aa, synthetic construct
  REGION 1..29: note = Description of Artificial Sequence: Synthetic peptide
  MOD_RES 2: note = Aib
  MOD_RES 16: note = Aib
  MOD_RES 17: note = Lys(C20)
  REGION 1..29: note = C-term amide
HXQGTFTSDYSKYLDXKAAREFIAWLLQT

SEQ ID NO: 920 - protein, 29 aa, synthetic construct
  REGION 1..29: note = Description of Artificial Sequence: Synthetic peptide
  MOD_RES 20: note = Lys(C8)
  REGION 1..29: note = C-term amide
HGQGTFTSDYSKYLDERRAKDFVQWLLQT

SEQ ID NO: 921 - protein, 29 aa, synthetic construct
  REGION 1..29: note = Description of Artificial Sequence: Synthetic peptide
  MOD_RES 20: note = Lys(C12)
  REGION 1..29: note = C-term amide
HGQGTFTSDYSKYLDERRAKDFVQWLLQT

SEQ ID NO: 922 - protein, 29 aa, synthetic construct
  REGION 1..29: note = Description of Artificial Sequence: Synthetic peptide
  MOD_RES 20: note = Lys(C14)
  REGION 1..29: note = C-term amide
HGQGTFTSDYSKYLDERRAKDFVQWLLQT

SEQ ID NO: 923 - protein, 29 aa, synthetic construct
  REGION 1..29: note = Description of Artificial Sequence: Synthetic peptide
  MOD_RES 20: note = Lys(C16)
  REGION 1..29: note = C-term amide
HGQGTFTSDYSKYLDERRAKDFVQWLLQT

SEQ ID NO: 924 - protein, 29 aa, synthetic construct
  REGION 1..29: note = Description of Artificial Sequence: Synthetic peptide
  MOD_RES 20: note = Lys(C18)
  REGION 1..29: note = C-term amide
HGQGTFTSDYSKYLDERRAKDFVQWLLQT

SEQ ID NO: 925 - protein, 29 aa, synthetic construct
  REGION 1..29: note = Description of Artificial Sequence: Synthetic peptide
  MOD_RES 20: note = Lys(C20)
  REGION 1..29: note = C-term amide
HGQGTFTSDYSKYLDERRAKDFVQWLLQT

SEQ ID NO: 926 - protein, 29 aa, synthetic construct
  REGION 1..29: note = Description of Artificial Sequence: Synthetic peptide
  MOD_RES 2: note = Aib
  MOD_RES 20: note = Lys(C8)
  REGION 1..29: note = C-term amide
HXQGTFTSDYSKYLDERRAKDFVQWLLQT

SEQ ID NO: 927 - protein, 29 aa, synthetic construct
  REGION 1..29: note = Description of Artificial Sequence: Synthetic peptide
  MOD_RES 2: note = Aib
  MOD_RES 20: note = Lys(C12)
  REGION 1..29: note = C-term amide
HXQGTFTSDYSKYLDERRAKDFVQWLLQT

SEQ ID NO: 928 - protein, 29 aa, synthetic construct
  REGION 1..29: note = Description of Artificial Sequence: Synthetic peptide
  MOD_RES 2: note = Aib
  MOD_RES 20: note = Lys(C14)
  REGION 1..29: note = C-term amide
HXQGTFTSDYSKYLDERRAKDFVQWLLQT

SEQ ID NO: 929 - protein, 29 aa, synthetic construct
  REGION 1..29: note = Description of Artificial Sequence: Synthetic peptide
  MOD_RES 2: note = Aib
  MOD_RES 20: note = Lys(C16)
  REGION 1..29: note = C-term amide
HXQGTFTSDYSKYLDERRAKDFVQWLLQT

SEQ ID NO: 930 - protein, 29 aa, synthetic construct
  REGION 1..29: note = Description of Artificial Sequence: Synthetic peptide
  MOD_RES 2: note = Aib
  MOD_RES 20: note = Lys(C18)
  REGION 1..29: note = C-term amide
HXQGTFTSDYSKYLDERRAKDFVQWLLQT

SEQ ID NO: 931 - protein, 29 aa, synthetic construct
  REGION 1..29: note = Description of Artificial Sequence: Synthetic peptide
  MOD_RES 2: note = Aib
  MOD_RES 20: note = Lys(C20)
  REGION 1..29: note = C-term amide
HXQGTFTSDYSKYLDERRAKDFVQWLLQT

SEQ ID NO: 932 - protein, 29 aa, synthetic construct
  REGION 1..29: note = Description of Artificial Sequence: Synthetic peptide
  MOD_RES 2: note = Aib
  REGION 16..20: note = misc_feature - Cyclic
  MOD_RES 16: note = Glu is cyclized through side chain to form a lactam linkage
  MOD_RES 20: note = Lys is cyclized through side chain to form a lactam linkage
  MOD_RES 24: note = Lys(C8)
  REGION 1..29: note = C-term amide
HXQGTFTSDYSKYLDEQAAKEFIKWLMQT

SEQ ID NO: 933 - protein, 29 aa, synthetic construct
  REGION 1..29: note = Description of Artificial Sequence: Synthetic peptide
  MOD_RES 2: note = Aib
  REGION 16..20: note = misc_feature - Cyclic
  MOD_RES 16: note = Glu is cyclized through side chain to form a lactam linkage
  MOD_RES 20: note = Lys is cyclized through side chain to form a lactam linkage
  MOD_RES 24: note = Lys(C12)
  REGION 1..29: note = C-term amide
HXQGTFTSDYSKYLDEQAAKEFIKWLMQT

SEQ ID NO: 934 - protein, 29 aa, synthetic construct
  REGION 1..29: note = Description of Artificial Sequence: Synthetic peptide
  MOD_RES 2: note = Aib
  REGION 16..20: note = misc_feature - Cyclic
  MOD_RES 16: note = Glu is cyclized through side chain to form a lactam linkage
  MOD_RES 20: note = Lys is cyclized through side chain to form a lactam linkage
  MOD_RES 24: note = Lys(C14)
  REGION 1..29: note = C-term amide
HXQGTFTSDYSKYLDEQAAKEFIKWLMQT

SEQ ID NO: 935 - protein, 29 aa, synthetic construct
  REGION 1..29: note = Description of Artificial Sequence: Synthetic peptide
  MOD_RES 2: note = Aib
  REGION 16..20: note = misc_feature - Cyclic
  MOD_RES 16: note = Glu is cyclized through side chain to form a lactam linkage
  MOD_RES 20: note = Lys is cyclized through side chain to form a lactam linkage
  MOD_RES 24: note = Lys(C16)
  REGION 1..29: note = C-term amide
HXQGTFTSDYSKYLDEQAAKEFIKWLMQT

SEQ ID NO: 936 - protein, 29 aa, synthetic construct
  REGION 1..29: note = Description of Artificial Sequence: Synthetic peptide
  MOD_RES 2: note = Aib
  REGION 16..20: note = misc_feature - Cyclic
  MOD_RES 16: note = Glu is cyclized through side chain to form a lactam linkage
  MOD_RES 20: note = Lys is cyclized through side chain to form a lactam linkage
  MOD_RES 24: note = Lys(C18)
  REGION 1..29: note = C-term amide
HXQGTFTSDYSKYLDEQAAKEFIKWLMQT

SEQ ID NO: 937 - protein, 29 aa, synthetic construct
  REGION 1..29: note = Description of Artificial Sequence: Synthetic peptide
  MOD_RES 2: note = Aib
  REGION 16..20: note = misc_feature - Cyclic
  MOD_RES 16: note = Glu is cyclized through side chain to form a lactam linkage
  MOD_RES 20: note = Lys is cyclized through side chain to form a lactam linkage
  MOD_RES 24: note = Lys(C20)
  REGION 1..29: note = C-term amide
HXQGTFTSDYSKYLDEQAAKEFIKWLMQT

SEQ ID NO: 938 - protein, 29 aa, synthetic construct
  REGION 1..29: note = Description of Artificial Sequence: Synthetic peptide
  MOD_RES 2: note = Aib
  REGION 16..20: note = misc_feature - Cyclic
  MOD_RES 16: note = Glu is cyclized through side chain to form a lactam linkage
  MOD_RES 20: note = Lys is cyclized through side chain to form a lactam linkage
  MOD_RES 24: note = Lys(C8)
  REGION 1..29: note = C-term amide
HXQGTFTSDYSKYLDEQAAKEFIKWLLQT

SEQ ID NO: 939 - protein, 29 aa, synthetic construct
  REGION 1..29: note = Description of Artificial Sequence: Synthetic peptide
  MOD_RES 2: note = Aib
  REGION 16..20: note = misc_feature - Cyclic
  MOD_RES 16: note = Glu is cyclized through side chain to form a lactam linkage
  MOD_RES 20: note = Lys is cyclized through side chain to form a lactam linkage
  MOD_RES 24: note = Lys(C12)
  REGION 1..29: note = C-term amide
HXQGTFTSDYSKYLDEQAAKEFIKWLLQT

SEQ ID NO: 940 - protein, 29 aa, synthetic construct
  REGION 1..29: note = Description of Artificial Sequence: Synthetic peptide
  MOD_RES 2: note = Aib
  REGION 16..20: note = misc_feature - Cyclic
  MOD_RES 16: note = Glu is cyclized through side chain to form a lactam linkage
  MOD_RES 20: note = Lys is cyclized through side chain to form a lactam linkage
  MOD_RES 24: note = Lys(C14)
  REGION 1..29: note = C-term amide
HXQGTFTSDYSKYLDEQAAKEFIKWLLQT

SEQ ID NO: 941 - protein, 29 aa, synthetic construct
  REGION 1..29: note = Description of Artificial Sequence: Synthetic peptide
  MOD_RES 2: note = Aib
  REGION 16..20: note = misc_feature - Cyclic
  MOD_RES 16: note = Glu is cyclized through side chain to form a lactam linkage
  MOD_RES 20: note = Lys is cyclized through side chain to form a lactam linkage
  MOD_RES 24: note = Lys(C16)
  REGION 1..29: note = C-term amide
HXQGTFTSDYSKYLDEQAAKEFIKWLLQT

SEQ ID NO: 942 - protein, 29 aa, synthetic construct
  REGION 1..29: note = Description of Artificial Sequence: Synthetic peptide
  MOD_RES 2: note = Aib
  REGION 16..20: note = misc_feature - Cyclic
  MOD_RES 16: note = Glu is cyclized through side chain to form a lactam linkage
  MOD_RES 20: note = Lys is cyclized through side chain to form a lactam linkage
  MOD_RES 24: note = Lys(C18)
  REGION 1..29: note = C-term amide
HXQGTFTSDYSKYLDEQAAKEFIKWLLQT

SEQ ID NO: 943 - protein, 29 aa, synthetic construct
  REGION 1..29: note = Description of Artificial Sequence: Synthetic peptide
  MOD_RES 2: note = Aib
  REGION 16..20: note = misc_feature - Cyclic
  MOD_RES 16: note = Glu is cyclized through side chain to form a lactam linkage
  MOD_RES 20: note = Lys is cyclized through side chain to form a lactam linkage
  MOD_RES 24: note = Lys(C20)
  REGION 1..29: note = C-term amide
HXQGTFTSDYSKYLDEQAAKEFIKWLLQT

SEQ ID NO: 944 - protein, 29 aa, synthetic construct
  REGION 1..29: note = Description of Artificial Sequence: Synthetic peptide
  MOD_RES 2: note = Aib
  REGION 16..20: note = misc_feature - Cyclic
  MOD_RES 16: note = Glu is cyclized through side chain to form a lactam linkage
  MOD_RES 20: note = Lys is cyclized through side chain to form a lactam linkage
  MOD_RES 24: note = Lys(M8)
  REGION 1..29: note = C-term amide
HXQGTFTSDYSKYLDEQAAKEFIKWLLQT

SEQ ID NO: 945 - protein, 29 aa, synthetic construct
  REGION 1..29: note = Description of Artificial Sequence: Synthetic peptide
  MOD_RES 2: note = Aib
  REGION 16..20: note = misc_feature - Cyclic
  MOD_RES 16: note = Glu is cyclized through side chain to form a lactam linkage
  MOD_RES 20: note = Lys is cyclized through side chain to form a lactam linkage
  MOD_RES 24: note = Lys(M12)
  REGION 1..29: note = C-term amide
HXQGTFTSDYSKYLDEQAAKEFIKWLLQT

SEQ ID NO: 946 - protein, 29 aa, synthetic construct
  REGION 1..29: note = Description of Artificial Sequence: Synthetic peptide
  MOD_RES 2: note = Aib
  REGION 16..20: note = misc_feature - Cyclic
  MOD_RES 16: note = Glu is cyclized through side chain to form a lactam linkage
  MOD_RES 20: note = Lys is cyclized through side chain to form a lactam linkage
  MOD_RES 24: note = Lys(M14)
  REGION 1..29: note = C-term amide
HXQGTFTSDYSKYLDEQAAKEFIKWLLQT

SEQ ID NO: 947 - protein, 29 aa, synthetic construct
  REGION 1..29: note = Description of Artificial Sequence: Synthetic peptide
  MOD_RES 2: note = Aib
  REGION 16..20: note = misc_feature - Cyclic
  MOD_RES 16: note = Glu is cyclized through side chain to form a lactam linkage
  MOD_RES 20: note = Lys is cyclized through side chain to form a lactam linkage
  MOD_RES 24: note = Lys(M16)
  REGION 1..29: note = C-term amide
HXQGTFTSDYSKYLDEQAAKEFIKWLLQT

SEQ ID NO: 948 - protein, 29 aa, synthetic construct
  REGION 1..29: note = Description of Artificial Sequence: Synthetic peptide
  MOD_RES 2: note = Aib
  REGION 16..20: note = misc_feature - Cyclic
  MOD_RES 16: note = Glu is cyclized through side chain to form a lactam linkage
  MOD_RES 20: note = Lys is cyclized through side chain to form a lactam linkage
  MOD_RES 24: note = Lys(M18)
  REGION 1..29: note = C-term amide
HXQGTFTSDYSKYLDEQAAKEFIKWLLQT

SEQ ID NO: 949 - protein, 29 aa, synthetic construct
  REGION 1..29: note = Description of Artificial Sequence: Synthetic peptide
  MOD_RES 2: note = Aib
  REGION 16..20: note = misc_feature - Cyclic
  MOD_RES 16: note = Glu is cyclized through side chain to form a lactam linkage
  MOD_RES 20: note = Lys is cyclized through side chain to form a lactam linkage
  MOD_RES 24: note = Lys(M20)
  REGION 1..29: note = C-term amide
HXQGTFTSDYSKYLDEQAAKEFIKWLLQT

SEQ ID NO: 950 - protein, 29 aa, synthetic construct
  REGION 1..29: note = Description of Artificial Sequence: Synthetic peptide
  MOD_RES 24: note = Lys(M8)
  REGION 1..29: note = C-term amide
HGQGTFTSDYSKYLDEQAAREFIKWLLQT

SEQ ID NO: 951 - protein, 29 aa, synthetic construct
  REGION 1..29: note = Description of Artificial Sequence: Synthetic peptide
  MOD_RES 24: note = Lys(M12)
  REGION 1..29: note = C-term amide
HGQGTFTSDYSKYLDEQAAREFIKWLLQT

SEQ ID NO: 952 - protein, 29 aa, synthetic construct
  REGION 1..29: note = Description of Artificial Sequence: Synthetic peptide
  MOD_RES 24: note = Lys(M14)
  REGION 1..29: note = C-term amide
HGQGTFTSDYSKYLDEQAAREFIKWLLQT

SEQ ID NO: 953 - protein, 29 aa, synthetic construct
  REGION 1..29: note = Description of Artificial Sequence: Synthetic peptide
  MOD_RES 24: note = Lys(M16)
  REGION 1..29: note = C-term amide
HGQGTFTSDYSKYLDEQAAREFIKWLLQT

SEQ ID NO: 954 - protein, 29 aa, synthetic construct
  REGION 1..29: note = Description of Artificial Sequence: Synthetic peptide
  MOD_RES 24: note = Lys(M18)
  REGION 1..29: note = C-term amide
HGQGTFTSDYSKYLDEQAAREFIKWLLQT

SEQ ID NO: 955 - protein, 29 aa, synthetic construct
  REGION 1..29: note = Description of Artificial Sequence: Synthetic peptide
  MOD_RES 24: note = Lys(M20)
  REGION 1..29: note = C-term amide
HGQGTFTSDYSKYLDEQAAREFIKWLLQT

SEQ ID NO: 956 - protein, 29 aa, synthetic construct
  REGION 1..29: note = Description of Artificial Sequence: Synthetic peptide
  MOD_RES 17: note = Lys(M8)
  REGION 1..29: note = C-term amide
HGQGTFTSDYSKYLDEKAAKEFIAWLLNT

SEQ ID NO: 957 - protein, 29 aa, synthetic construct
  REGION 1..29: note = Description of Artificial Sequence: Synthetic peptide
  MOD_RES 17: note = Lys(M12)
  REGION 1..29: note = C-term amide
HGQGTFTSDYSKYLDEKAAKEFIAWLLNT

SEQ ID NO: 958 - protein, 29 aa, synthetic construct
  REGION 1..29: note = Description of Artificial Sequence: Synthetic peptide
  MOD_RES 17: note = Lys(M14)
  REGION 1..29: note = C-term amide
HGQGTFTSDYSKYLDEKAAKEFIAWLLNT

SEQ ID NO: 959 - protein, 29 aa, synthetic construct
  REGION 1..29: note = Description of Artificial Sequence: Synthetic peptide
  MOD_RES 17: note = Lys(M16)
  REGION 1..29: note = C-term amide
HGQGTFTSDYSKYLDEKAAKEFIAWLLNT

SEQ ID NO: 960 - protein, 29 aa, synthetic construct
  REGION 1..29: note = Description of Artificial Sequence: Synthetic peptide
  MOD_RES 17: note = Lys(M18)
  REGION 1..29: note = C-term amide
HGQGTFTSDYSKYLDEKAAKEFIAWLLNT

SEQ ID NO: 961 - protein, 29 aa, synthetic construct
  REGION 1..29: note = Description of Artificial Sequence: Synthetic peptide
  MOD_RES 17: note = Lys(M20)
  REGION 1..29: note = C-term amide
HGQGTFTSDYSKYLDEKAAKEFIAWLLNT

SEQ ID NO: 962 - protein, 29 aa, synthetic construct
  REGION 1..29: note = Description of Artificial Sequence: Synthetic peptide
  MOD_RES 17: note = Lys(M8)
  REGION 1..29: note = C-term amide
HGQGTFTSDYSKYLDEKAAREFIAWLLQT

SEQ ID NO: 963 - protein, 29 aa, synthetic construct
  REGION 1..29: note = Description of Artificial Sequence: Synthetic peptide
  MOD_RES 17: note = Lys(M12)
  REGION 1..29: note = C-term amide
HGQGTFTSDYSKYLDEKAAREFIAWLLQT

SEQ ID NO: 964 - protein, 29 aa, synthetic construct
  REGION 1..29: note = Description of Artificial Sequence: Synthetic peptide
  MOD_RES 17: note = Lys(M14)
  REGION 1..29: note = C-term amide
HGQGTFTSDYSKYLDEKAAREFIAWLLQT

SEQ ID NO: 965 - protein, 29 aa, synthetic construct
  REGION 1..29: note = Description of Artificial Sequence: Synthetic peptide
  MOD_RES 17: note = Lys(M16)
  REGION 1..29: note = C-term amide
HGQGTFTSDYSKYLDEKAAREFIAWLLQT

SEQ ID NO: 966 - protein, 29 aa, synthetic construct
  REGION 1..29: note = Description of Artificial Sequence: Synthetic peptide
  MOD_RES 17: note = Lys(M18)
  REGION 1..29: note = C-term amide
HGQGTFTSDYSKYLDEKAAREFIAWLLQT

SEQ ID NO: 967 - protein, 29 aa, synthetic construct
  REGION 1..29: note = Description of Artificial Sequence: Synthetic peptide
  MOD_RES 17: note = Lys(M20)
  REGION 1..29: note = C-term amide
HGQGTFTSDYSKYLDEKAAREFIAWLLQT

SEQ ID NO: 968 - protein, 29 aa, synthetic construct
  REGION 1..29: note = Description of Artificial Sequence: Synthetic peptide
  MOD_RES 2: note = Aib
  REGION 16..20: note = misc_feature - Cyclic
  MOD_RES 16: note = Glu is cyclized through side chain to form a lactam linkage
  MOD_RES 20: note = Lys is cyclized through side chain to form a lactam linkage
  MOD_RES 24: note = Lys(Me8)
  REGION 1..29: note = C-term amide
HXQGTFTSDYSKYLDEQAAKEFIKWLLQT

SEQ ID NO: 969 - protein, 29 aa, synthetic construct
  REGION 1..29: note = Description of Artificial Sequence: Synthetic peptide
  MOD_RES 2: note = Aib
  REGION 16..20: note = misc_feature - Cyclic
  MOD_RES 16: note = Glu is cyclized through side chain to form a lactam linkage
  MOD_RES 20: note = Lys is cyclized through side chain to form a lactam linkage
  MOD_RES 24: note = Lys(Me12)
  REGION 1..29: note = C-term amide
HXQGTFTSDYSKYLDEQAAKEFIKWLLQT

SEQ ID NO: 970 - protein, 29 aa, synthetic construct
  REGION 1..29: note = Description of Artificial Sequence: Synthetic peptide
  MOD_RES 2: note = Aib
  REGION 16..20: note = misc_feature - Cyclic
  MOD_RES 16: note = Glu is cyclized through side chain to form a lactam linkage
  MOD_RES 20: note = Lys is cyclized through side chain to form a lactam linkage
  MOD_RES 24: note = Lys(Me14)
  REGION 1..29: note = C-term amide
HXQGTFTSDYSKYLDEQAAKEFIKWLLQT

SEQ ID NO: 971 - protein, 29 aa, synthetic construct
  REGION 1..29: note = Description of Artificial Sequence: Synthetic peptide
  MOD_RES 2: note = Aib
  REGION 16..20: note = misc_feature - Cyclic
  MOD_RES 16: note = Glu is cyclized through side chain to form a lactam linkage
  MOD_RES 20: note = Lys is cyclized through side chain to form a lactam linkage
  MOD_RES 24: note = Lys(Me16)
  REGION 1..29: note = C-term amide
HXQGTFTSDYSKYLDEQAAKEFIKWLLQT

SEQ ID NO: 972 - protein, 29 aa, synthetic construct
  REGION 1..29: note = Description of Artificial Sequence: Synthetic peptide
  MOD_RES 2: note = Aib
  REGION 16..20: note = misc_feature - Cyclic
  MOD_RES 16: note = Glu is cyclized through side chain to form a lactam linkage
  MOD_RES 20: note = Lys is cyclized through side chain to form a lactam linkage
  MOD_RES 24: note = Lys(Me18)
  REGION 1..29: note = C-term amide
HXQGTFTSDYSKYLDEQAAKEFIKWLLQT

SEQ ID NO: 973 - protein, 29 aa, synthetic construct
  REGION 1..29: note = Description of Artificial Sequence: Synthetic peptide
  MOD_RES 2: note = Aib
  REGION 16..20: note = misc_feature - Cyclic
  MOD_RES 16: note = Glu is cyclized through side chain to form a lactam linkage
  MOD_RES 20: note = Lys is cyclized through side chain to form a lactam linkage
  MOD_RES 24: note = Lys(Me20)
  REGION 1..29: note = C-term amide
HXQGTFTSDYSKYLDEQAAKEFIKWLLQT

SEQ ID NO: 974 - protein, 29 aa, synthetic construct
  REGION 1..29: note = Description of Artificial Sequence: Synthetic peptide
  MOD_RES 24: note = Lys(Me8)
  REGION 1..29: note = C-term amide
HGQGTFTSDYSKYLDEQAAREFIKWLLQT

SEQ ID NO: 975 - protein, 29 aa, synthetic construct
  REGION 1..29: note = Description of Artificial Sequence: Synthetic peptide
  MOD_RES 24: note = Lys(Me12)
  REGION 1..29: note = C-term amide
HGQGTFTSDYSKYLDEQAAREFIKWLLQT

SEQ ID NO: 976 - protein, 29 aa, synthetic construct
  REGION 1..29: note = Description of Artificial Sequence: Synthetic peptide
  MOD_RES 24: note = Lys(Me14)
  REGION 1..29: note = C-term amide
HGQGTFTSDYSKYLDEQAAREFIKWLLQT

SEQ ID NO: 977 - protein, 29 aa, synthetic construct
  REGION 1..29: note = Description of Artificial Sequence: Synthetic peptide
  MOD_RES 24: note = Lys(Me16)
  REGION 1..29: note = C-term amide
HGQGTFTSDYSKYLDEQAAREFIKWLLQT

SEQ ID NO: 978 - protein, 29 aa, synthetic construct
  REGION 1..29: note = Description of Artificial Sequence: Synthetic peptide
  MOD_RES 24: note = Lys(Me18)
  REGION 1..29: note = C-term amide
HGQGTFTSDYSKYLDEQAAREFIKWLLQT

SEQ ID NO: 979 - protein, 29 aa, synthetic construct
  REGION 1..29: note = Description of Artificial Sequence: Synthetic peptide
  MOD_RES 24: note = Lys(Me20)
  REGION 1..29: note = C-term amide
HGQGTFTSDYSKYLDEQAAREFIKWLLQT

SEQ ID NO: 980 - protein, 29 aa, synthetic construct
  REGION 1..29: note = Description of Artificial Sequence: Synthetic peptide
  MOD_RES 17: note = Lys(Me8)
  REGION 1..29: note = C-term amide
HGQGTFTSDYSKYLDEKAAKEFIAWLLNT

SEQ ID NO: 981 - protein, 29 aa, synthetic construct
  REGION 1..29: note = Description of Artificial Sequence: Synthetic peptide
  MOD_RES 17: note = Lys(Me12)
  REGION 1..29: note = C-term amide
HGQGTFTSDYSKYLDEKAAKEFIAWLLNT

SEQ ID NO: 982 - protein, 29 aa, synthetic construct
  REGION 1..29: note = Description of Artificial Sequence: Synthetic peptide
  MOD_RES 17: note = Lys(Me14)
  REGION 1..29: note = C-term amide
HGQGTFTSDYSKYLDEKAAKEFIAWLLNT

SEQ ID NO: 983 - protein, 29 aa, synthetic construct
  REGION 1..29: note = Description of Artificial Sequence: Synthetic peptide
  MOD_RES 17: note = Lys(Me16)
  REGION 1..29: note = C-term amide
HGQGTFTSDYSKYLDEKAAKEFIAWLLNT

SEQ ID NO: 984 - protein, 29 aa, synthetic construct
  REGION 1..29: note = Description of Artificial Sequence: Synthetic peptide
  MOD_RES 17: note = Lys(Me18)
  REGION 1..29: note = C-term amide
HGQGTFTSDYSKYLDEKAAKEFIAWLLNT

SEQ ID NO: 985 - protein, 29 aa, synthetic construct
  REGION 1..29: note = Description of Artificial Sequence: Synthetic peptide
  MOD_RES 17: note = Lys(Me20)
  REGION 1..29: note = C-term amide
HGQGTFTSDYSKYLDEKAAKEFIAWLLNT

SEQ ID NO: 986 - protein, 29 aa, synthetic construct
  REGION 1..29: note = Description of Artificial Sequence: Synthetic peptide
  MOD_RES 17: note = Lys(Me8)
  REGION 1..29: note = C-term amide
HGQGTFTSDYSKYLDEKAAREFIAWLLQT

SEQ ID NO: 987 - protein, 29 aa, synthetic construct
  REGION 1..29: note = Description of Artificial Sequence: Synthetic peptide
  MOD_RES 17: note = Lys(Me12)
  REGION 1..29: note = C-term amide
HGQGTFTSDYSKYLDEKAAREFIAWLLQT

SEQ ID NO: 988 - protein, 29 aa, synthetic construct
  REGION 1..29: note = Description of Artificial Sequence: Synthetic peptide
  MOD_RES 17: note = Lys(Me14)
  REGION 1..29: note = C-term amide
HGQGTFTSDYSKYLDEKAAREFIAWLLQT

SEQ ID NO: 989 - protein, 29 aa, synthetic construct
  REGION 1..29: note = Description of Artificial Sequence: Synthetic peptide
  MOD_RES 17: note = Lys(Me16)
  REGION 1..29: note = C-term amide
HGQGTFTSDYSKYLDEKAAREFIAWLLQT

SEQ ID NO: 990 - protein, 29 aa, synthetic construct
  REGION 1..29: note = Description of Artificial Sequence: Synthetic peptide
  MOD_RES 17: note = Lys(Me18)
  REGION 1..29: note = C-term amide
HGQGTFTSDYSKYLDEKAAREFIAWLLQT

SEQ ID NO: 991 - protein, 29 aa, synthetic construct
  REGION 1..29: note = Description of Artificial Sequence: Synthetic peptide
  MOD_RES 17: note = Lys(Me20)
  REGION 1..29: note = C-term amide
HGQGTFTSDYSKYLDEKAAREFIAWLLQT

SEQ ID NO: 992 - protein, 11 aa, synthetic construct
  REGION 1..11: note = Description of Artificial Sequence: Synthetic peptide
  MOD_RES 2: note = Alpha-MePro
  MOD_RES 6: note = Alpha-MeF
  MOD_RES 10: note = EtBip
  MOD_RES 11: note = Lys(C8)
  REGION 1..11: note = C-term amide
HPQGTFTSDXK

SEQ ID NO: 993 - protein, 11 aa, synthetic construct
  REGION 1..11: note = Description of Artificial Sequence: Synthetic peptide
  MOD_RES 2: note = Alpha-MePro
  MOD_RES 6: note = Alpha-MeF
  MOD_RES 10: note = EtBip
  MOD_RES 11: note = Lys(C12)
  REGION 1..11: note = C-term amide
HPQGTFTSDXK

SEQ ID NO: 994 - protein, 11 aa, synthetic construct
  REGION 1..11: note = Description of Artificial Sequence: Synthetic peptide
  MOD_RES 2: note = Alpha-MePro
  MOD_RES 6: note = Alpha-MeF
  MOD_RES 10: note = EtBip
  MOD_RES 11: note = Lys(C14)
  REGION 1..11: note = C-term amide
HPQGTFTSDXK

SEQ ID NO: 995 - protein, 11 aa, synthetic construct
  REGION 1..11: note = Description of Artificial Sequence: Synthetic peptide
  MOD_RES 2: note = Alpha-MePro
  MOD_RES 6: note = Alpha-MeF
  MOD_RES 10: note = EtBip
  MOD_RES 11: note = Lys(C16)
  REGION 1..11: note = C-term amide
HPQGTFTSDXK

SEQ ID NO: 996 - protein, 11 aa, synthetic construct
  REGION 1..11: note = Description of Artificial Sequence: Synthetic peptide
  MOD_RES 2: note = Alpha-MePro
  MOD_RES 6: note = Alpha-MeF
  MOD_RES 10: note = EtBip
  MOD_RES 11: note = Lys(C18)
  REGION 1..11: note = C-term amide
HPQGTFTSDXK

SEQ ID NO: 997 - protein, 11 aa, synthetic construct
  REGION 1..11: note = Description of Artificial Sequence: Synthetic peptide
  MOD_RES 2: note = Alpha-MePro
  MOD_RES 6: note = Alpha-MeF
  MOD_RES 10: note = EtBip
  MOD_RES 11: note = Lys(C20)
  REGION 1..11: note = C-term amide
HPQGTFTSDXK

SEQ ID NO: 998 - protein, 11 aa, synthetic construct
  REGION 1..11: note = Description of Artificial Sequence: Synthetic peptide
  MOD_RES 2: note = Alpha-MePro
  MOD_RES 6: note = Alpha-MeFF
  MOD_RES 10: note = EtBip
  MOD_RES 11: note = Lys(C8)
  REGION 1..11: note = C-term amide
HPQGTFTSDXK

SEQ ID NO: 999 - protein, 11 aa, synthetic construct
  REGION 1..11: note = Description of Artificial Sequence: Synthetic peptide
  MOD_RES 2: note = Alpha-MePro
  MOD_RES 6: note = Alpha-MeFF
  MOD_RES 10: note = EtBip
  MOD_RES 11: note = Lys(C12)
  REGION 1..11: note = C-term amide
HPQGTFTSDXK

SEQ ID NO: 1000 - protein, 11 aa, synthetic construct
  REGION 1..11: note = Description of Artificial Sequence: Synthetic peptide
  MOD_RES 2: note = Alpha-MePro
  MOD_RES 6: note = Alpha-MeFF
  MOD_RES 10: note = EtBip
  MOD_RES 11: note = Lys(C14)
  REGION 1..11: note = C-term amide
HPQGTFTSDXK

SEQ ID NO: 1001 - protein, 11 aa, synthetic construct
  REGION 1..11: note = Description of Artificial Sequence: Synthetic peptide
  MOD_RES 2: note = Alpha-MePro
  MOD_RES 6: note = Alpha-MeFF
  MOD_RES 10: note = EtBip
  MOD_RES 11: note = Lys(C16)
  REGION 1..11: note = C-term amide
HPQGTFTSDXK

SEQ ID NO: 1002 - protein, 11 aa, synthetic construct
  REGION 1..11: note = Description of Artificial Sequence: Synthetic peptide
  MOD_RES 2: note = Alpha-MePro
  MOD_RES 6: note = Alpha-MeFF
  MOD_RES 10: note = EtBip
  MOD_RES 11: note = Lys(C18)
  REGION 1..11: note = C-term amide
HPQGTFTSDXK

SEQ ID NO: 1003 - protein, 11 aa, synthetic construct
  REGION 1..11: note = Description of Artificial Sequence: Synthetic peptide
  MOD_RES 2: note = Alpha-MePro
  MOD_RES 6: note = Alpha-MeFF
  MOD_RES 10: note = EtBip
  MOD_RES 11: note = Lys(C20)
  REGION 1..11: note = C-term amide
HPQGTFTSDXK

SEQ ID NO: 1004 - protein, 11 aa, synthetic construct
  REGION 1..11: note = Description of Artificial Sequence: Synthetic peptide
  MOD_RES 2: note = Aib
  MOD_RES 6: note = Alpha-MeF
  MOD_RES 10: note = EtBip
  MOD_RES 11: note = Lys(C8)
  REGION 1..11: note = C-term amide
HXQGTFTSDXK

SEQ ID NO: 1005 - protein, 11 aa, synthetic construct
  REGION 1..11: note = Description of Artificial Sequence: Synthetic peptide
  MOD_RES 2: note = Aib
  MOD_RES 6: note = Alpha-MeF
  MOD_RES 10: note = EtBip
  MOD_RES 11: note = Lys(C12)
  REGION 1..11: note = C-term amide
HXQGTFTSDXK

SEQ ID NO: 1006 - protein, 11 aa, synthetic construct
  REGION 1..11: note = Description of Artificial Sequence: Synthetic peptide
  MOD_RES 2: note = Aib
  MOD_RES 6: note = Alpha-MeF
  MOD_RES 10: note = EtBip
  MOD_RES 11: note = Lys(C14)
  REGION 1..11: note = C-term amide
HXQGTFTSDXK

SEQ ID NO: 1007 - protein, 11 aa, synthetic construct
  REGION 1..11: note = Description of Artificial Sequence: Synthetic peptide
  MOD_RES 2: note = Aib
  MOD_RES 6: note = Alpha-MeF
  MOD_RES 10: note = EtBip
  MOD_RES 11: note = Lys(C16)
  REGION 1..11: note = C-term amide
HXQGTFTSDXK

SEQ ID NO: 1008 - protein, 11 aa, synthetic construct
  REGION 1..11: note = Description of Artificial Sequence: Synthetic peptide
  MOD_RES 2: note = Aib
  MOD_RES 6: note = Alpha-MeF
  MOD_RES 10: note = EtBip
  MOD_RES 11: note = Lys(C18)
  REGION 1..11: note = C-term amide
HXQGTFTSDXK

SEQ ID NO: 1009 - protein, 11 aa, synthetic construct
  REGION 1..11: note = Description of Artificial Sequence: Synthetic peptide
  MOD_RES 2: note = Aib
  MOD_RES 6: note = Alpha-MeF
  MOD_RES 10: note = EtBip
  MOD_RES 11: note = Lys(C20)
  REGION 1..11: note = C-term amide
HXQGTFTSDXK

SEQ ID NO: 1010 - protein, 11 aa, synthetic construct
  REGION 1..11: note = Description of Artificial Sequence: Synthetic peptide
  MOD_RES 2: note = Aib
  MOD_RES 6: note = Alpha-MeFF
  MOD_RES 10: note = EtBip
  MOD_RES 11: note = Lys(C8)
  REGION 1..11: note = C-term amide
HXQGTFTSDXK

SEQ ID NO: 1011 - protein, 11 aa, synthetic construct
  REGION 1..11: note = Description of Artificial Sequence: Synthetic peptide
  MOD_RES 2: note = Aib
  MOD_RES 6: note = Alpha-MeFF
  MOD_RES 10: note = EtBip
  MOD_RES 11: note = Lys(C12)
  REGION 1..11: note = C-term amide
HXQGTFTSDXK

SEQ ID NO: 1012 - protein, 11 aa, synthetic construct
  REGION 1..11: note = Description of Artificial Sequence: Synthetic peptide
  MOD_RES 2: note = Aib
  MOD_RES 6: note = Alpha-MeFF
  MOD_RES 10: note = EtBip
  MOD_RES 11: note = Lys(C14)
  REGION 1..11: note = C-term amide
HXQGTFTSDXK

SEQ ID NO: 1013 - protein, 11 aa, synthetic construct
  REGION 1..11: note = Description of Artificial Sequence: Synthetic peptide
  MOD_RES 2: note = Aib
  MOD_RES 6: note = Alpha-MeFF
  MOD_RES 10: note = EtBip
  MOD_RES 11: note = Lys(C16)
  REGION 1..11: note = C-term amide
HXQGTFTSDXK

SEQ ID NO: 1014 - protein, 11 aa, synthetic construct
  REGION 1..11: note = Description of Artificial Sequence: Synthetic peptide
  MOD_RES 2: note = Aib
  MOD_RES 6: note = Alpha-MeFF
  MOD_RES 10: note = EtBip
  MOD_RES 11: note = Lys(C18)
  REGION 1..11: note = C-term amide
HXQGTFTSDXK

SEQ ID NO: 1015 - protein, 11 aa, synthetic construct
  REGION 1..11: note = Description of Artificial Sequence: Synthetic peptide
  MOD_RES 2: note = Aib
  MOD_RES 6: note = Alpha-MeFF
  MOD_RES 10: note = EtBip
  MOD_RES 11: note = Lys(C20)
  REGION 1..11: note = C-term amide
HXQGTFTSDXK

SEQ ID NO: 1016 - protein, 11 aa, synthetic construct
  REGION 1..11: note = Description of Artificial Sequence: Synthetic peptide
  MOD_RES 2: note = Alpha-MePro
  MOD_RES 6: note = Alpha-MeF
  MOD_RES 10: note = EtBip
  MOD_RES 11: note = MeLys(C8)
  REGION 1..11: note = C-term amide
HPQGTFTSDXK

SEQ ID NO: 1017 - protein, 11 aa, synthetic construct
  REGION 1..11: note = Description of Artificial Sequence: Synthetic peptide
  MOD_RES 2: note = Alpha-MePro
  MOD_RES 6: note = Alpha-MeF
  MOD_RES 10: note = EtBip
  MOD_RES 11: note = MeLys(C12)
  REGION 1..11: note = C-term amide
HPQGTFTSDXK

SEQ ID NO: 1018 - protein, 11 aa, synthetic construct
  REGION 1..11: note = Description of Artificial Sequence: Synthetic peptide
  MOD_RES 2: note = Alpha-MePro
  MOD_RES 6: note = Alpha-MeF
  MOD_RES 10: note = EtBip
  MOD_RES 11: note = MeLys(C14)
  REGION 1..11: note = C-term amide
HPQGTFTSDXK

SEQ ID NO: 1019 - protein, 11 aa, synthetic construct
  REGION 1..11: note = Description of Artificial Sequence: Synthetic peptide
  MOD_RES 2: note = Alpha-MePro
  MOD_RES 6: note = Alpha-MeF
  MOD_RES 10: note = EtBip
  MOD_RES 11: note = MeLys(C16)
  REGION 1..11: note = C-term amide
HPQGTFTSDXK

SEQ ID NO: 1020 - protein, 11 aa, synthetic construct
  REGION 1..11: note = Description of Artificial Sequence: Synthetic peptide
  MOD_RES 2: note = Alpha-MePro
  MOD_RES 6: note = Alpha-MeF
  MOD_RES 10: note = EtBip
  MOD_RES 11: note = MeLys(C18)
  REGION 1..11: note = C-term amide
HPQGTFTSDXK

SEQ ID NO: 1021 - protein, 11 aa, synthetic construct
  REGION 1..11: note = Description of Artificial Sequence: Synthetic peptide
  MOD_RES 2: note = Alpha-MePro
  MOD_RES 6: note = Alpha-MeF
  MOD_RES 10: note = EtBip
  MOD_RES 11: note = MeLys(C20)
  REGION 1..11: note = C-term amide
HPQGTFTSDXK

SEQ ID NO: 1022 - protein, 11 aa, synthetic construct
  REGION 1..11: note = Description of Artificial Sequence: Synthetic peptide
  MOD_RES 2: note = Alpha-MePro
  MOD_RES 6: note = Alpha-MeFF
  MOD_RES 10: note = EtBip
  MOD_RES 11: note = MeLys(C8)
  REGION 1..11: note = C-term amide
HPQGTFTSDXK

SEQ ID NO: 1023 - protein, 11 aa, synthetic construct
  REGION 1..11: note = Description of Artificial Sequence: Synthetic peptide
  MOD_RES 2: note = Alpha-MePro
  MOD_RES 6: note = Alpha-MeFF
  MOD_RES 10: note = EtBip
  MOD_RES 11: note = MeLys(C12)
  REGION 1..11: note = C-term amide
HPQGTFTSDXK

SEQ ID NO: 1024 - protein, 11 aa, synthetic construct
  REGION 1..11: note = Description of Artificial Sequence: Synthetic peptide
  MOD_RES 2: note = Alpha-MePro
  MOD_RES 6: note = Alpha-MeFF
  MOD_RES 10: note = EtBip
  MOD_RES 11: note = MeLys(C14)
  REGION 1..11: note = C-term amide
HPQGTFTSDXK

SEQ ID NO: 1025 - protein, 11 aa, synthetic construct
  REGION 1..11: note = Description of Artificial Sequence: Synthetic peptide
  MOD_RES 2: note = Alpha-MePro
  MOD_RES 6: note = Alpha-MeFF
  MOD_RES 10: note = EtBip
  MOD_RES 11: note = MeLys(C16)
  REGION 1..11: note = C-term amide
HPQGTFTSDXK

SEQ ID NO: 1026 - protein, 11 aa, synthetic construct
  REGION 1..11: note = Description of Artificial Sequence: Synthetic peptide
  MOD_RES 2: note = Alpha-MePro
  MOD_RES 6: note = Alpha-MeFF
  MOD_RES 10: note = EtBip
  MOD_RES 11: note = MeLys(C18)
  REGION 1..11: note = C-term amide
HPQGTFTSDXK

SEQ ID NO: 1027 - protein, 11 aa, synthetic construct
  REGION 1..11: note = Description of Artificial Sequence: Synthetic peptide
  MOD_RES 2: note = Alpha-MePro
  MOD_RES 6: note = Alpha-MeFF
  MOD_RES 10: note = EtBip
  MOD_RES 11: note = MeLys(C20)
  REGION 1..11: note = C-term amide
HPQGTFTSDXK

SEQ ID NO: 1028 - protein, 11 aa, synthetic construct
  REGION 1..11: note = Description of Artificial Sequence: Synthetic peptide
  MOD_RES 2: note = Aib
  MOD_RES 6: note = Alpha-MeF
  MOD_RES 10: note = EtBip
  MOD_RES 11: note = MeLys(C8)
  REGION 1..11: note = C-term amide
HXQGTFTSDXK

SEQ ID NO: 1029 - protein, 11 aa, synthetic construct
  REGION 1..11: note = Description of Artificial Sequence: Synthetic peptide
  MOD_RES 2: note = Aib
  MOD_RES 6: note = Alpha-MeF
  MOD_RES 10: note = EtBip
  MOD_RES 11: note = MeLys(C12)
  REGION 1..11: note = C-term amide
HXQGTFTSDXK

SEQ ID NO: 1030 - protein, 11 aa, synthetic construct
  REGION 1..11: note = Description of Artificial Sequence: Synthetic peptide
  MOD_RES 2: note = Aib
  MOD_RES 6: note = Alpha-MeF
  MOD_RES 10: note = EtBip
  MOD_RES 11: note = MeLys(C14)
  REGION 1..11: note = C-term amide
HXQGTFTSDXK

SEQ ID NO: 1031 - protein, 11 aa, synthetic construct
  REGION 1..11: note = Description of Artificial Sequence: Synthetic peptide
  MOD_RES 2: note = Aib
  MOD_RES 6: note = Alpha-MeF
  MOD_RES 10: note = EtBip
  MOD_RES 11: note = MeLys(C16)
  REGION 1..11: note = C-term amide
HXQGTFTSDXK

SEQ ID NO: 1032 - protein, 11 aa, synthetic construct
  REGION 1..11: note = Description of Artificial Sequence: Synthetic peptide
  MOD_RES 2: note = Aib
  MOD_RES 6: note = Alpha-MeF
  MOD_RES 10: note = EtBip
  MOD_RES 11: note = MeLys(C18)
  REGION 1..11: note = C-term amide
HXQGTFTSDXK

SEQ ID NO: 1033 - protein, 11 aa, synthetic construct
  REGION 1..11: note = Description of Artificial Sequence: Synthetic peptide
  MOD_RES 2: note = Aib
  MOD_RES 6: note = Alpha-MeF
  MOD_RES 10: note = EtBip
  MOD_RES 11: note = MeLys(C20)
  REGION 1..11: note = C-term amide
HXQGTFTSDXK

SEQ ID NO: 1034 - protein, 11 aa, synthetic construct
  REGION 1..11: note = Description of Artificial Sequence: Synthetic peptide
  MOD_RES 2: note = Aib
  MOD_RES 6: note = Alpha-MeFF
  MOD_RES 10: note = EtBip
  MOD_RES 11: note = MeLys(C8)
  REGION 1..11: note = C-term amide
HXQGTFTSDXK

SEQ ID NO: 1035 - protein, 11 aa, synthetic construct
  REGION 1..11: note = Description of Artificial Sequence: Synthetic peptide
  MOD_RES 2: note = Aib
  MOD_RES 6: note = Alpha-MeFF
  MOD_RES 10: note = EtBip
  MOD_RES 11: note = MeLys(C12)
  REGION 1..11: note = C-term amide
HXQGTFTSDXK

SEQ ID NO: 1036 - protein, 11 aa, synthetic construct
  REGION 1..11: note = Description of Artificial Sequence: Synthetic peptide
  MOD_RES 2: note = Aib
  MOD_RES 6: note = Alpha-MeFF
  MOD_RES 10: note = EtBip
  MOD_RES 11: note = MeLys(C14)
  REGION 1..11: note = C-term amide
HXQGTFTSDXK

SEQ ID NO: 1037 - protein, 11 aa, synthetic construct
  REGION 1..11: note = Description of Artificial Sequence: Synthetic peptide
  MOD_RES 2: note = Aib
  MOD_RES 6: note = Alpha-MeFF
  MOD_RES 10: note = EtBip
  MOD_RES 11: note = MeLys(C16)
  REGION 1..11: note = C-term amide
HXQGTFTSDXK

SEQ ID NO: 1038 - protein, 11 aa, synthetic construct
  REGION 1..11: note = Description of Artificial Sequence: Synthetic peptide
  MOD_RES 2: note = Aib
  MOD_RES 6: note = Alpha-MeFF
  MOD_RES 10: note = EtBip
  MOD_RES 11: note = MeLys(C18)
  REGION 1..11: note = C-term amide
HXQGTFTSDXK

SEQ ID NO: 1039 - protein, 11 aa, synthetic construct
  REGION 1..11: note = Description of Artificial Sequence: Synthetic peptide
  MOD_RES 2: note = Aib
  MOD_RES 6: note = Alpha-MeFF
  MOD_RES 10: note = EtBip
  MOD_RES 11: note = MeLys(C20)
  REGION 1..11: note = C-term amide
HXQGTFTSDXK

SEQ ID NO: 1040 - protein, 11 aa, synthetic construct
  REGION 1..11: note = Description of Artificial Sequence: Synthetic peptide
  MOD_RES 2: note = Alpha-MePro
  MOD_RES 6: note = Alpha-MeF
  MOD_RES 10: note = EtBip
  MOD_RES 11: note = Me8
  REGION 1..11: note = C-term amide
HPQGTFTSDXK

SEQ ID NO: 1041 - protein, 11 aa, synthetic construct
  REGION 1..11: note = Description of Artificial Sequence: Synthetic peptide
  MOD_RES 2: note = Alpha-MePro
  MOD_RES 6: note = Alpha-MeF
  MOD_RES 10: note = EtBip
  MOD_RES 11: note = Me12
  REGION 1..11: note = C-term amide
HPQGTFTSDXK

SEQ ID NO: 1042 - protein, 11 aa, synthetic construct
  REGION 1..11: note = Description of Artificial Sequence: Synthetic peptide
  MOD_RES 2: note = Alpha-MePro
  MOD_RES 6: note = Alpha-MeF
  MOD_RES 10: note = EtBip
  MOD_RES 11: note = Me14
  REGION 1..11: note = C-term amide
HPQGTFTSDXK

SEQ ID NO: 1043 - protein, 11 aa, synthetic construct
  REGION 1..11: note = Description of Artificial Sequence: Synthetic peptide
  MOD_RES 2: note = Alpha-MePro
  MOD_RES 6: note = Alpha-MeF
  MOD_RES 10: note = EtBip
  MOD_RES 11: note = Me16
  REGION 1..11: note = C-term amide
HPQGTFTSDXK

SEQ ID NO: 1044 - protein, 11 aa, synthetic construct
  REGION 1..11: note = Description of Artificial Sequence: Synthetic peptide
  MOD_RES 2: note = Alpha-MePro
  MOD_RES 6: note = Alpha-MeF
  MOD_RES 10: note = EtBip
  MOD_RES 11: note = Me18
  REGION 1..11: note = C-term amide
HPQGTFTSDXK

SEQ ID NO: 1045 - protein, 11 aa, synthetic construct
  REGION 1..11: note = Description of Artificial Sequence: Synthetic peptide
  MOD_RES 2: note = Alpha-MePro
  MOD_RES 6: note = Alpha-MeF
  MOD_RES 10: note = EtBip
  MOD_RES 11: note = Me20
  REGION 1..11: note = C-term amide
HPQGTFTSDXK

SEQ ID NO: 1046 - protein, 11 aa, synthetic construct
  REGION 1..11: note = Description of Artificial Sequence: Synthetic peptide
  MOD_RES 2: note = Alpha-MePro
  MOD_RES 6: note = Alpha-MeFF
  MOD_RES 10: note = EtBip
  MOD_RES 11: note = Me8
  REGION 1..11: note = C-term amide
HPQGTFTSDXK

SEQ ID NO: 1047 - protein, 11 aa, synthetic construct
  REGION 1..11: note = Description of Artificial Sequence: Synthetic peptide
  MOD_RES 2: note = Alpha-MePro
  MOD_RES 6: note = Alpha-MeFF
  MOD_RES 10: note = EtBip
  MOD_RES 11: note = Me12
  REGION 1..11: note = C-term amide
HPQGTFTSDXK

SEQ ID NO: 1048 - protein, 11 aa, synthetic construct
  REGION 1..11: note = Description of Artificial Sequence: Synthetic peptide
  MOD_RES 2: note = Alpha-MePro
  MOD_RES 6: note = Alpha-MeFF
  MOD_RES 10: note = EtBip
  MOD_RES 11: note = Me14
  REGION 1..11: note = C-term amide
HPQGTFTSDXK

SEQ ID NO: 1049 - protein, 11 aa, synthetic construct
  REGION 1..11: note = Description of Artificial Sequence: Synthetic peptide
  MOD_RES 2: note = Alpha-MePro
  MOD_RES 6: note = Alpha-MeFF
  MOD_RES 10: note = EtBip
  MOD_RES 11: note = Me16
  REGION 1..11: note = C-term amide
HPQGTFTSDXK

SEQ ID NO: 1050 - protein, 11 aa, synthetic construct
  REGION 1..11: note = Description of Artificial Sequence: Synthetic peptide
  MOD_RES 2: note = Alpha-MePro
  MOD_RES 6: note = Alpha-MeFF
  MOD_RES 10: note = EtBip
  MOD_RES 11: note = Me18
  REGION 1..11: note = C-term amide
HPQGTFTSDXK

SEQ ID NO: 1051 - protein, 11 aa, synthetic construct
  REGION 1..11: note = Description of Artificial Sequence: Synthetic peptide
  MOD_RES 2: note = Alpha-MePro
  MOD_RES 6: note = Alpha-MeFF
  MOD_RES 10: note = EtBip
  MOD_RES 11: note = Me20
  REGION 1..11: note = C-term amide
HPQGTFTSDXK

SEQ ID NO: 1052 - protein, 11 aa, synthetic construct
  REGION 1..11: note = Description of Artificial Sequence: Synthetic peptide
  MOD_RES 2: note = Aib
  MOD_RES 6: note = Alpha-MeF
  MOD_RES 10: note = EtBip
  MOD_RES 11: note = Me8
  REGION 1..11: note = C-term amide
HXQGTFTSDXK

SEQ ID NO: 1053 - protein, 11 aa, synthetic construct
  REGION 1..11: note = Description of Artificial Sequence: Synthetic peptide
  MOD_RES 2: note = Aib
  MOD_RES 6: note = Alpha-MeF
  MOD_RES 10: note = EtBip
  MOD_RES 11: note = Me12
  REGION 1..11: note = C-term amide
HXQGTFTSDXK

SEQ ID NO: 1054 - protein, 11 aa, synthetic construct
  REGION 1..11: note = Description of Artificial Sequence: Synthetic peptide
  MOD_RES 2: note = Aib
  MOD_RES 6: note = Alpha-MeF
  MOD_RES 10: note = EtBip
  MOD_RES 11: note = Me14
  REGION 1..11: note = C-term amide
HXQGTFTSDXK

SEQ ID NO: 1055 - protein, 11 aa, synthetic construct
  REGION 1..11: note = Description of Artificial Sequence: Synthetic peptide
  MOD_RES 2: note = Aib
  MOD_RES 6: note = Alpha-MeF
  MOD_RES 10: note = EtBip
  MOD_RES 11: note = Me16
  REGION 1..11: note = C-term amide
HXQGTFTSDXK

SEQ ID NO: 1056 - protein, 11 aa, synthetic construct
  REGION 1..11: note = Description of Artificial Sequence: Synthetic peptide
  MOD_RES 2: note = Aib
  MOD_RES 6: note = Alpha-MeF
  MOD_RES 10: note = EtBip
  MOD_RES 11: note = Me18
  REGION 1..11: note = C-term amide
HXQGTFTSDXK

SEQ ID NO: 1057 - protein, 11 aa, synthetic construct
  REGION 1..11: note = Description of Artificial Sequence: Synthetic peptide
  MOD_RES 2: note = Aib
  MOD_RES 6: note = Alpha-MeFF
  MOD_RES 10: note = EtBip
  MOD_RES 11: note = Me20
  REGION 1..11: note = C-term amide
HXQGTFTSDXK

SEQ ID NO: 1058 - protein, 11 aa, synthetic construct
  REGION 1..11: note = Description of Artificial Sequence: Synthetic peptide
  MOD_RES 2: note = Aib
  MOD_RES 6: note = Alpha-MeFF
  MOD_RES 10: note = EtBip
  MOD_RES 11: note = Me8
  REGION 1..11: note = C-term amide
HXQGTFTSDXK

SEQ ID NO: 1059 - protein, 11 aa, synthetic construct
  REGION 1..11: note = Description of Artificial Sequence: Synthetic peptide
  MOD_RES 2: note = Aib
  MOD_RES 6: note = Alpha-MeFF
  MOD_RES 10: note = EtBip
  MOD_RES 11: note = Me12
  REGION 1..11: note = C-term amide
HXQGTFTSDXK

SEQ ID NO: 1060 - protein, 11 aa, synthetic construct
  REGION 1..11: note = Description of Artificial Sequence: Synthetic peptide
  MOD_RES 2: note = Aib
  MOD_RES 6: note = Alpha-MeFF
  MOD_RES 10: note = EtBip
  MOD_RES 11: note = Me14
  REGION 1..11: note = C-term amide
HXQGTFTSDXK

SEQ ID NO: 1061 - protein, 11 aa, synthetic construct
  REGION 1..11: note = Description of Artificial Sequence: Synthetic peptide
  MOD_RES 2: note = Aib
  MOD_RES 6: note = Alpha-MeFF
  MOD_RES 10: note = EtBip
  MOD_RES 11: note = Me16
  REGION 1..11: note = C-term amide
HXQGTFTSDXK

SEQ ID NO: 1062 - protein, 11 aa, synthetic construct
  REGION 1..11: note = Description of Artificial Sequence: Synthetic peptide
  MOD_RES 2: note = Aib
  MOD_RES 6: note = Alpha-MeFF
  MOD_RES 10: note = EtBip
  MOD_RES 11: note = Me18
  REGION 1..11: note = C-term amide
HXQGTFTSDXK

SEQ ID NO: 1063 - protein, 11 aa, synthetic construct
  REGION 1..11: note = Description of Artificial Sequence: Synthetic peptide
  MOD_RES 2: note = Aib
  MOD_RES 6: note = Alpha-MeFF
  MOD_RES 10: note = EtBip
  MOD_RES 11: note = Me20
  REGION 1..11: note = C-term amide
HXQGTFTSDXK

SEQ ID NO: 1064 - protein, 11 aa, synthetic construct
  REGION 1..11: note = Description of Artificial Sequence: Synthetic peptide
  MOD_RES 2: note = Alpha-MePro
  MOD_RES 6: note = Alpha-MeF
  MOD_RES 10: note = Bip
  MOD_RES 11: note = MeLys(C8)
  REGION 1..11: note = C-term amide
HPQGTFTSDXK

SEQ ID NO: 1065 - protein, 11 aa, synthetic construct
  REGION 1..11: note = Description of Artificial Sequence: Synthetic peptide
  MOD_RES 2: note = Alpha-MePro
  MOD_RES 6: note = Alpha-MeF
  MOD_RES 10: note = Bip
  MOD_RES 11: note = MeLys(C12)
  REGION 1..11: note = C-term amide
HPQGTFTSDXK

SEQ ID NO: 1066 - protein, 11 aa, synthetic construct
  REGION 1..11: note = Description of Artificial Sequence: Synthetic peptide
  MOD_RES 2: note = Alpha-MePro
  MOD_RES 6: note = Alpha-MeF
  MOD_RES 10: note = Bip
  MOD_RES 11: note = MeLys(C14)
  REGION 1..11: note = C-term amide
HPQGTFTSDXK

SEQ ID NO: 1067 - protein, 11 aa, synthetic construct
  REGION 1..11: note = Description of Artificial Sequence: Synthetic peptide
  MOD_RES 2: note = Alpha-MePro
  MOD_RES 6: note = Alpha-MeF
  MOD_RES 10: note = Bip
  MOD_RES 11: note = MeLys(C16)
  REGION 1..11: note = C-term amide
HPQGTFTSDXK

SEQ ID NO: 1068 - protein, 11 aa, synthetic construct
  REGION 1..11: note = Description of Artificial Sequence: Synthetic peptide
  MOD_RES 2: note = Alpha-MePro
  MOD_RES 6: note = Alpha-MeF
  MOD_RES 10: note = Bip
  MOD_RES 11: note = MeLys(C18)
  REGION 1..11: note = C-term amide
HPQGTFTSDXK

SEQ ID NO: 1069 - protein, 11 aa, synthetic construct
  REGION 1..11: note = Description of Artificial Sequence: Synthetic peptide
  MOD_RES 2: note = Alpha-MePro
  MOD_RES 6: note = Alpha-MeF
  MOD_RES 10: note = Bip
  MOD_RES 11: note = MeLys(C20)
  REGION 1..11: note = C-term amide
HPQGTFTSDXK

SEQ ID NO: 1070 - protein, 11 aa, synthetic construct
  REGION 1..11: note = Description of Artificial Sequence: Synthetic peptide
  MOD_RES 2: note = Alpha-MePro
  MOD_RES 6: note = Alpha-MeFF
  MOD_RES 10: note = Bip
  MOD_RES 11: note = MeLys(C8)
  REGION 1..11: note = C-term amide
HPQGTFTSDXK

SEQ ID NO: 1071 - protein, 11 aa, synthetic construct
  REGION 1..11: note = Description of Artificial Sequence: Synthetic peptide
  MOD_RES 2: note = Alpha-MePro
  MOD_RES 6: note = Alpha-MeFF
  MOD_RES 10: note = Bip
  MOD_RES 11: note = MeLys(C12)
  REGION 1..11: note = C-term amide
HPQGTFTSDXK

SEQ ID NO: 1072 - protein, 11 aa, synthetic construct
  REGION 1..11: note = Description of Artificial Sequence: Synthetic peptide
  MOD_RES 2: note = Alpha-MePro
  MOD_RES 6: note = Alpha-MeFF
  MOD_RES 10: note = Bip
  MOD_RES 11: note = MeLys(C14)
  REGION 1..11: note = C-term amide
HPQGTFTSDXK

SEQ ID NO: 1073 - protein, 11 aa, synthetic construct
  REGION 1..11: note = Description of Artificial Sequence: Synthetic peptide
  MOD_RES 2: note = Alpha-MePro
  MOD_RES 6: note = Alpha-MeFF
  MOD_RES 10: note = Bip
  MOD_RES 11: note = MeLys(C16)
  REGION 1..11: note = C-term amide
HPQGTFTSDXK

SEQ ID NO: 1074 - protein, 11 aa, synthetic construct
  REGION 1..11: note = Description of Artificial Sequence: Synthetic peptide
  MOD_RES 2: note = Alpha-MePro
  MOD_RES 6: note = Alpha-MeFF
  MOD_RES 10: note = Bip
  MOD_RES 11: note = MeLys(C18)
  REGION 1..11: note = C-term amide
HPQGTFTSDXK

SEQ ID NO: 1075 - protein, 11 aa, synthetic construct
  REGION 1..11: note = Description of Artificial Sequence: Synthetic peptide
  MOD_RES 2: note = Alpha-MePro
  MOD_RES 6: note = Alpha-MeFF
  MOD_RES 10: note = Bip
  MOD_RES 11: note = MeLys(C20)
  REGION 1..11: note = C-term amide
HPQGTFTSDXK

SEQ ID NO: 1076 - protein, 11 aa, synthetic construct
  REGION 1..11: note = Description of Artificial Sequence: Synthetic peptide
  MOD_RES 2: note = Aib
  MOD_RES 6: note = Alpha-MeF
  MOD_RES 10: note = Bip
  MOD_RES 11: note = MeLys(C8)
  REGION 1..11: note = C-term amide
HXQGTFTSDXK

SEQ ID NO: 1077 - protein, 11 aa, synthetic construct
  REGION 1..11: note = Description of Artificial Sequence: Synthetic peptide
  MOD_RES 2: note = Aib
  MOD_RES 6: note = Alpha-MeF
  MOD_RES 10: note = Bip
  MOD_RES 11: note = MeLys(C12)
  REGION 1..11: note = C-term amide
HXQGTFTSDXK

SEQ ID NO: 1078 - protein, 11 aa, synthetic construct
  REGION 1..11: note = Description of Artificial Sequence: Synthetic peptide
  MOD_RES 2: note = Aib
  MOD_RES 6: note = Alpha-MeF
  MOD_RES 10: note = Bip
  MOD_RES 11: note = MeLys(C14)
  REGION 1..11: note = C-term amide
HXQGTFTSDXK

SEQ ID NO: 1079 - protein, 11 aa, synthetic construct
  REGION 1..11: note = Description of Artificial Sequence: Synthetic peptide
  MOD_RES 2: note = Aib
  MOD_RES 6: note = Alpha-MeF
  MOD_RES 10: note = Bip
  MOD_RES 11: note = MeLys(C16)
  REGION 1..11: note = C-term amide
HXQGTFTSDXK

SEQ ID NO: 1080 - protein, 11 aa, synthetic construct
  REGION 1..11: note = Description of Artificial Sequence: Synthetic peptide
  MOD_RES 2: note = Aib
  MOD_RES 6: note = Alpha-MeF
  MOD_RES 10: note = Bip
  MOD_RES 11: note = MeLys(C18)
  REGION 1..11: note = C-term amide
HXQGTFTSDXK

SEQ ID NO: 1081 - protein, 11 aa, synthetic construct
  REGION 1..11: note = Description of Artificial Sequence: Synthetic peptide
  MOD_RES 2: note = Aib
  MOD_RES 6: note = Alpha-MeF
  MOD_RES 10: note = Bip
  MOD_RES 11: note = MeLys(C20)
  REGION 1..11: note = C-term amide
HXQGTFTSDXK

SEQ ID NO: 1082 - protein, 11 aa, synthetic construct
  REGION 1..11: note = Description of Artificial Sequence: Synthetic peptide
  MOD_RES 2: note = Aib
  MOD_RES 6: note = Alpha-MeFF
  MOD_RES 10: note = Bip
  MOD_RES 11: note = MeLys(C8)
  REGION 1..11: note = C-term amide
HXQGTFTSDXK

SEQ ID NO: 1083 - protein, 11 aa, synthetic construct
  REGION 1..11: note = Description of Artificial Sequence: Synthetic peptide
  MOD_RES 2: note = Aib
  MOD_RES 6: note = Alpha-MeFF
  MOD_RES 10: note = Bip
  MOD_RES 11: note = MeLys(C12)
  REGION 1..11: note = C-term amide
HXQGTFTSDXK

SEQ ID NO: 1084 - protein, 11 aa, synthetic construct
  REGION 1..11: note = Description of Artificial Sequence: Synthetic peptide
  MOD_RES 2: note = Aib
  MOD_RES 6: note = Alpha-MeFF
  MOD_RES 10: note = Bip
  MOD_RES 11: note = MeLys(C14)
  REGION 1..11: note = C-term amide
HXQGTFTSDXK

SEQ ID NO: 1085 - protein, 11 aa, synthetic construct
  REGION 1..11: note = Description of Artificial Sequence: Synthetic peptide
  MOD_RES 2: note = Aib
  MOD_RES 6: note = Alpha-MeFF
  MOD_RES 10: note = Bip
  MOD_RES 11: note = MeLys(C16)
  REGION 1..11: note = C-term amide
HXQGTFTSDXK

SEQ ID NO: 1086 - protein, 11 aa, synthetic construct
  REGION 1..11: note = Description of Artificial Sequence: Synthetic peptide
  MOD_RES 2: note = Aib
  MOD_RES 6: note = Alpha-MeFF
  MOD_RES 10: note = Bip
  MOD_RES 11: note = MeLys(C18)
  REGION 1..11: note = C-term amide
HXQGTFTSDXK

SEQ ID NO: 1087 - protein, 11 aa, synthetic construct
  REGION 1..11: note = Description of Artificial Sequence: Synthetic peptide
  MOD_RES 2: note = Aib
  MOD_RES 6: note = Alpha-MeFF
  MOD_RES 10: note = Bip
  MOD_RES 11: note = MeLys(C20)
  REGION 1..11: note = C-term amide
HXQGTFTSDXK

SEQ ID NO: 1088 - protein, 11 aa, synthetic construct
  REGION 1..11: note = Description of Artificial Sequence: Synthetic peptide
  MOD_RES 2: note = Alpha-MePro
  MOD_RES 6: note = Alpha-MeF
  MOD_RES 10: note = Bip
  MOD_RES 11: note = Me8
  REGION 1..11: note = C-term amide
HPQGTFTSDXK

SEQ ID NO: 1089 - protein, 11 aa, synthetic construct
  REGION 1..11: note = Description of Artificial Sequence: Synthetic peptide
  MOD_RES 2: note = Alpha-MePro
  MOD_RES 6: note = Alpha-MeF
  MOD_RES 10: note = Bip
  MOD_RES 11: note = Me12
  REGION 1..11: note = C-term amide
HPQGTFTSDXK

SEQ ID NO: 1090 - protein, 11 aa, synthetic construct
  REGION 1..11: note = Description of Artificial Sequence: Synthetic peptide
  MOD_RES 2: note = Alpha-MePro
  MOD_RES 6: note = Alpha-MeF
  MOD_RES 10: note = Bip
  MOD_RES 11: note = Me14
  REGION 1..11: note = C-term amide
HPQGTFTSDXK

SEQ ID NO: 1091 - protein, 11 aa, synthetic construct
  REGION 1..11: note = Description of Artificial Sequence: Synthetic peptide
  MOD_RES 2: note = Alpha-MePro
  MOD_RES 6: note = Alpha-MeF
  MOD_RES 10: note = Bip
  MOD_RES 11: note = Me16
  REGION 1..11: note = C-term amide
HPQGTFTSDXK

SEQ ID NO: 1092 - protein, 11 aa, synthetic construct
  REGION 1..11: note = Description of Artificial Sequence: Synthetic peptide
  MOD_RES 2: note = Alpha-MePro
  MOD_RES 6: note = Alpha-MeF
  MOD_RES 10: note = Bip
  MOD_RES 11: note = Me18
  REGION 1..11: note = C-term amide
HPQGTFTSDXK

SEQ ID NO: 1093 - protein, 11 aa, synthetic construct
  REGION 1..11: note = Description of Artificial Sequence: Synthetic peptide
  MOD_RES 2: note = Alpha-MePro
  MOD_RES 6: note = Alpha-MeF
  MOD_RES 10: note = Bip
  MOD_RES 11: note = Me20
  REGION 1..11: note = C-term amide
HPQGTFTSDXK

SEQ ID NO: 1094 - protein, 11 aa, synthetic construct
  REGION 1..11: note = Description of Artificial Sequence: Synthetic peptide
  MOD_RES 2: note = Alpha-MePro
  MOD_RES 6: note = Alpha-MeFF
  MOD_RES 10: note = Bip
  MOD_RES 11: note = Me8
  REGION 1..11: note = C-term amide
HPQGTFTSDXK

SEQ ID NO: 1095 - protein, 11 aa, synthetic construct
  REGION 1..11: note = Description of Artificial Sequence: Synthetic peptide
  MOD_RES 2: note = Alpha-MePro
  MOD_RES 6: note = Alpha-MeFF
  MOD_RES 10: note = Bip
  MOD_RES 11: note = Me12
  REGION 1..11: note = C-term amide
HPQGTFTSDXK

SEQ ID NO: 1096 - protein, 11 aa, synthetic construct
  REGION 1..11: note = Description of Artificial Sequence: Synthetic peptide
  MOD_RES 2: note = Alpha-MePro
  MOD_RES 6: note = Alpha-MeFF
  MOD_RES 10: note = Bip
  MOD_RES 11: note = Me14
  REGION 1..11: note = C-term amide
HPQGTFTSDXK

SEQ ID NO: 1097 - protein, 11 aa, synthetic construct
  REGION 1..11: note = Description of Artificial Sequence: Synthetic peptide
  MOD_RES 2: note = Alpha-MePro
  MOD_RES 6: note = Alpha-MeFF
  MOD_RES 10: note = Bip
  MOD_RES 11: note = Me16
  REGION 1..11: note = C-term amide
HPQGTFTSDXK

SEQ ID NO: 1098 - protein, 11 aa, synthetic construct
  REGION 1..11: note = Description of Artificial Sequence: Synthetic peptide
  MOD_RES 2: note = Alpha-MePro
  MOD_RES 6: note = Alpha-MeFF
  MOD_RES 10: note = Bip
  MOD_RES 11: note = Me18
  REGION 1..11: note = C-term amide
HPQGTFTSDXK

SEQ ID NO: 1099 - protein, 11 aa, synthetic construct
  REGION 1..11: note = Description of Artificial Sequence: Synthetic peptide
  MOD_RES 2: note = Alpha-MePro
  MOD_RES 6: note = Alpha-MeFF
  MOD_RES 10: note = Bip
  MOD_RES 11: note = Me20
  REGION 1..11: note = C-term amide
HPQGTFTSDXK

SEQ ID NO: 1100 - protein, 11 aa, synthetic construct
  REGION 1..11: note = Description of Artificial Sequence: Synthetic peptide
  MOD_RES 2: note = Aib
  MOD_RES 6: note = Alpha-MeF
  MOD_RES 10: note = Bip
  MOD_RES 11: note = Me8
  REGION 1..11: note = C-term amide
HXQGTFTSDXK

SEQ ID NO: 1101 - protein, 11 aa, synthetic construct
  REGION 1..11: note = Description of Artificial Sequence: Synthetic peptide
  MOD_RES 2: note = Aib
  MOD_RES 6: note = Alpha-MeF
  MOD_RES 10: note = Bip
  MOD_RES 11: note = Me12
  REGION 1..11: note = C-term amide
HXQGTFTSDXK

SEQ ID NO: 1102 - protein, 11 aa, synthetic construct
  REGION 1..11: note = Description of Artificial Sequence: Synthetic peptide
  MOD_RES 2: note = Aib
  MOD_RES 6: note = Alpha-MeF
  MOD_RES 10: note = Bip
  MOD_RES 11: note = Me14
  REGION 1..11: note = C-term amide
HXQGTFTSDXK

SEQ ID NO: 1103 - protein, 11 aa, synthetic construct
  REGION 1..11: note = Description of Artificial Sequence: Synthetic peptide
  MOD_RES 2: note = Aib
  MOD_RES 6: note = Alpha-MeF
  MOD_RES 10: note = Bip
  MOD_RES 11: note = Me16
  REGION 1..11: note = C-term amide
HXQGTFTSDXK

SEQ ID NO: 1104 - protein, 11 aa, synthetic construct
  REGION 1..11: note = Description of Artificial Sequence: Synthetic peptide
  MOD_RES 2: note = Aib
  MOD_RES 6: note = Alpha-MeF
  MOD_RES 10: note = Bip
  MOD_RES 11: note = Me18
  REGION 1..11: note = C-term amide
HXQGTFTSDXK

SEQ ID NO: 1105 - protein, 11 aa, synthetic construct
  REGION 1..11: note = Description of Artificial Sequence: Synthetic peptide
  MOD_RES 2: note = Aib
  MOD_RES 6: note = Alpha-MeF
  MOD_RES 10: note = Bip
  MOD_RES 11: note = Me20
  REGION 1..11: note = C-term amide
HXQGTFTSDXK

SEQ ID NO: 1106 - protein, 11 aa, synthetic construct
  REGION 1..11: note = Description of Artificial Sequence: Synthetic peptide
  MOD_RES 2: note = Aib
  MOD_RES 6: note = Alpha-MeFF
  MOD_RES 10: note = Bip
  MOD_RES 11: note = Me8
  REGION 1..11: note = C-term amide
HXQGTFTSDXK

SEQ ID NO: 1107 - protein, 11 aa, synthetic construct
  REGION 1..11: note = Description of Artificial Sequence: Synthetic peptide
  MOD_RES 2: note = Aib
  MOD_RES 6: note = Alpha-MeFF
  MOD_RES 10: note = Bip
  MOD_RES 11: note = Me12
  REGION 1..11: note = C-term amide
HXQGTFTSDXK

SEQ ID NO: 1108 - protein, 11 aa, synthetic construct
  REGION 1..11: note = Description of Artificial Sequence: Synthetic peptide
  MOD_RES 2: note = Aib
  MOD_RES 6: note = Alpha-MeFF
  MOD_RES 10: note = Bip
  MOD_RES 11: note = Me14
  REGION 1..11: note = C-term amide
HXQGTFTSDXK

SEQ ID NO: 1109 - protein, 11 aa, synthetic construct
  REGION 1..11: note = Description of Artificial Sequence: Synthetic peptide
  MOD_RES 2: note = Aib
  MOD_RES 6: note = Alpha-MeFF
  MOD_RES 10: note = Bip
  MOD_RES 11: note = Me16
  REGION 1..11: note = C-term amide
HXQGTFTSDXK

SEQ ID NO: 1110 - protein, 11 aa, synthetic construct
  REGION 1..11: note = Description of Artificial Sequence: Synthetic peptide
  MOD_RES 2: note = Aib
  MOD_RES 6: note = Alpha-MeFF
  MOD_RES 10: note = Bip
  MOD_RES 11: note = Me18
  REGION 1..11: note = C-term amide
HXQGTFTSDXK

SEQ ID NO: 1111 - protein, 11 aa, synthetic construct
  REGION 1..11: note = Description of Artificial Sequence: Synthetic peptide
  MOD_RES 2: note = Aib
  MOD_RES 6: note = Alpha-MeFF
  MOD_RES 10: note = Bip
  MOD_RES 11: note = Me20
  REGION 1..11: note = C-term amide
HXQGTFTSDXK

SEQ ID NO: 1112 - protein, 29 aa, synthetic construct
  REGION 1..29: note = Description of Artificial Sequence: Synthetic peptide
  MOD_RES 2: note = Aib
  REGION 16..20: note = misc_feature - Cyclic
  MOD_RES 16: note = Glu is cyclized through side chain to form a lactam linkage
  MOD_RES 20: note = Lys is cyclized through side chain to form a lactam linkage
  MOD_RES 24: note = Lys(C9)
  REGION 1..29: note = C-term amide
HXQGTFTSDYSKYLDEQAAKEFIKWLLQT

SEQ ID NO: 1113 - protein, 29 aa, synthetic construct
  REGION 1..29: note = Description of Artificial Sequence: Synthetic peptide
  MOD_RES 2: note = Aib
  REGION 16..20: note = misc_feature - Cyclic
  MOD_RES 16: note = Glu is cyclized through side chain to form a lactam linkage
  MOD_RES 20: note = Lys is cyclized through side chain to form a lactam linkage
  MOD_RES 24: note = Lys(C10)
  REGION 1..29: note = C-term amide
HXQGTFTSDYSKYLDEQAAKEFIKWLLQT

SEQ ID NO: 1114 - protein, 29 aa, synthetic construct
  REGION 1..29: note = Description of Artificial Sequence: Synthetic peptide
  MOD_RES 2: note = Aib
  REGION 16..20: note = misc_feature - Cyclic
  MOD_RES 16: note = Glu is cyclized through side chain to form a lactam linkage
  MOD_RES 20: note = Lys is cyclized through side chain to form a lactam linkage
  MOD_RES 24: note = Lys(C11)
  REGION 1..29: note = C-term amide
HXQGTFTSDYSKYLDEQAAKEFIKWLLQT

SEQ ID NO: 1115 - protein, 29 aa, synthetic construct
  REGION 1..29: note = Description of Artificial Sequence: Synthetic peptide
  MOD_RES 2: note = Aib
  REGION 16..20: note = misc_feature - Cyclic
  MOD_RES 16: note = Glu is cyclized through side chain to form a lactam linkage
  MOD_RES 20: note = Lys is cyclized through side chain to form a lactam linkage
  MOD_RES 24: note = Lys(alpha-Me8)
  REGION 1..29: note = C-term amide
HXQGTFTSDYSKYLDEQAAKEFIKWLLQT

SEQ ID NO: 1116 - protein, 29 aa, synthetic construct
  REGION 1..29: note = Description of Artificial Sequence: Synthetic peptide
  MOD_RES 2: note = Aib
  REGION 16..20: note = misc_feature - Cyclic
  MOD_RES 16: note = Glu is cyclized through side chain to form a lactam linkage
  MOD_RES 20: note = Lys is cyclized through side chain to form a lactam linkage
  MOD_RES 24: note = Lys(alpha-Me10)
  REGION 1..29: note = C-term amide
HXQGTFTSDYSKYLDEQAAKEFIKWLLQT

SEQ ID NO: 1117 - protein, 29 aa, synthetic construct
  REGION 1..29: note = Description of Artificial Sequence: Synthetic peptide
  MOD_RES 2: note = Aib
  REGION 16..20: note = misc_feature - Cyclic
  MOD_RES 16: note = Glu is cyclized through side chain to form a lactam linkage
  MOD_RES 20: note = Lys is cyclized through side chain to form a lactam linkage
  MOD_RES 24: note = Lys(alpha-Me12)
  REGION 1..29: note = C-term amide
HXQGTFTSDYSKYLDEQAAKEFIKWLLQT

SEQ ID NO: 1118 - protein, 29 aa, synthetic construct
  REGION 1..29: note = Description of Artificial Sequence: Synthetic peptide
  MOD_RES 2: note = Aib
  REGION 16..20: note = misc_feature - Cyclic
  MOD_RES 16: note = Glu is cyclized through side chain to form a lactam linkage
  MOD_RES 20: note = Lys is cyclized through side chain to form a lactam linkage
  MOD_RES 24: note = Lys(alpha-Me14)
  REGION 1..29: note = C-term amide
HXQGTFTSDYSKYLDEQAAKEFIKWLLQT

SEQ ID NO: 1119 - protein, 29 aa, synthetic construct
  REGION 1..29: note = Description of Artificial Sequence: Synthetic peptide
  MOD_RES 2: note = Aib
  REGION 16..20: note = misc_feature - Cyclic
  MOD_RES 16: note = Glu is cyclized through side chain to form a lactam linkage
  MOD_RES 20: note = Lys is cyclized through side chain to form a lactam linkage
  MOD_RES 24: note = Lys(alpha-Me16)
  REGION 1..29: note = C-term amide
HXQGTFTSDYSKYLDEQAAKEFIKWLLQT

SEQ ID NO: 1120 - protein, 29 aa, synthetic construct
  REGION 1..29: note = Description of Artificial Sequence: Synthetic peptide
  MOD_RES 2: note = Aib
  REGION 16..20: note = misc_feature - Cyclic
  MOD_RES 16: note = Glu is cyclized through side chain to form a lactam linkage
  MOD_RES 20: note = Lys is cyclized through side chain to form a lactam linkage
  MOD_RES 24: note = Lys(alpha-Me18)
  REGION 1..29: note = C-term amide
HXQGTFTSDYSKYLDEQAAKEFIKWLLQT

SEQ ID NO: 1121 - skipped

SEQ ID NO: 1122 - protein, 4 aa, synthetic construct
  REGION 1..4: note = Description of Artificial Sequence: Synthetic peptide
  REGION 1..4: note = C-term NH2
YPWF

SEQ ID NO: 1123 - protein, 4 aa, synthetic construct
  REGION 1..4: note = Description of Artificial Sequence: Synthetic peptide
  REGION 1..4: note = C-term NH2
YPFF

SEQ ID NO: 1124 - protein, 5 aa, synthetic construct
  REGION 1..5: note = Description of Artificial Sequence: Synthetic peptide
  REGION 1..5: note = N-term Ac
  MOD_RES 1: note = Lys(1-octyl Beta-D-glucuronide-6-yl)
  REGION 1..5: note = C-term NH2
KYPWF

SEQ ID NO: 1125 - protein, 4 aa, synthetic construct
  REGION 1..4: note = Description of Artificial Sequence: Synthetic peptide
  REGION 1..4: note = N-term Fmoc
  MOD_RES 1: note = Tyr(t-Bu)
  MOD_RES 3: note = Trp(Boc)
YPWF

SEQ ID NO: 1126 - protein, 5 aa, synthetic construct
  REGION 1..5: note = Description of Artificial Sequence: Synthetic peptide
  REGION 1..5: note = N-term Ac
  MOD_RES 1: note = Lys(Boc)
  MOD_RES 2: note = Tyr(t-Bu)
  MOD_RES 4: note = Trp(Boc)
KYPWF

SEQ ID NO: 1127 - protein, 4 aa, synthetic construct
  REGION 1..4: note = Description of Artificial Sequence: Synthetic peptide
  REGION 1..4: note = N-term Fmoc
  MOD_RES 1: note = 2'-6'dimethyl-L-Tyr
  MOD_RES 3: note = 2', 4', 6'-trimethyl-L-Phe
  MOD_RES 4: note = N-epsilon-(Alloc)-L-Lys
YPFK

SEQ ID NO: 1128 - protein, 17 aa, synthetic construct
  REGION 1..17: note = Description of Artificial Sequence: Synthetic peptide
  REGION 1..17: note = N-term Fmoc
  MOD_RES 1: note = Ac5c
  MOD_RES 3: note = Aib
  MOD_RES 8: note = Nle
  MOD_RES 17: note = Lys(Alloc)
XVXEIQLLHQRARWIQK

SEQ ID NO: 1129 - protein, 17 aa, synthetic construct
  REGION 1..17: note = Description of Artificial Sequence: Synthetic peptide
  REGION 1..17: note = N-term Fmoc
  MOD_RES 2: note = Aib
  MOD_RES 10: note = Bip
  MOD_RES 17: note = Lys(Alloc)
HXQGTFTSDXSKYLESK

SEQ ID NO: 1130 - protein, 29 aa, synthetic construct
  REGION 1..29: note = Description of Artificial Sequence: Synthetic peptide
  REGION 1..29: note = N-term Boc
  MOD_RES 1: note = His(Trt)
  MOD_RES 2: note = Aib
  MOD_RES 3: note = Gln(Trt)
  MOD_RES 5: note = Thr(tBu)
  MOD_RES 7: note = Thr(tBu)
  MOD_RES 8: note = Ser(tBu)
  MOD_RES 9: note = Asp(OtBu)
  MOD_RES 10: note = Tyr(tBu)
  MOD_RES 11: note = Ser(tBu)
  MOD_RES 12: note = Lys(Boc)
  MOD_RES 13: note = Tyr(tBu)
  MOD_RES 15: note = Asp(OtBu)
  MOD_RES 16: note = Glu(O-Allyl)
  MOD_RES 17: note = Gln(Trt)
  MOD_RES 20: note = Lys(Alloc)
  MOD_RES 21: note = Glu(O-tBu)
  MOD_RES 24: note = Lys(Dde)
  MOD_RES 25: note = Trp(Boc)
  MOD_RES 28: note = Gln(Trt)
  MOD_RES 29: note = Thr(tBu)
HXQGTFTSDYSKYLDEQAAKEFIKWLLQT

SEQ ID NO: 1131 - protein, 4 aa, synthetic construct
  REGION 1..4: note = Description of Artificial Sequence: Synthetic peptide
YLPW

SEQ ID NO: 1132 - skipped